United States Patent Application Publication US 2024/0002870 A1 - sequence listing, part 2

SEQ ID NO: 262 - DNA, 21697 bp, Artificial Sequence
  PHP97881
gtttacccgccaatatatcctgtcaaacactgcggccgcacttgaccgcggatggagccggagctgtggtgaggccatcgacgggaggtgggggagaacacagtctcagtgttctttgtgagtccgcaaggtttttagcttttctgtattaattaaggttgctgttggctgtagaatacggtcgtggaagagctgtatcggtagctactacgtaagctattatatactggaagtctggagctcgtcgatctccggtcgtcttcctccatttctcctcgtcttgctttgactgctgctaccatttgcttctgttttctgatgaagcatgccatgtcggccaccagtgtttgtgtggtttttgcagggaatggctttcaagtgctgtgattgaatggccctcgtcgtcctcggctgagctcacatggacgcgtcatgtgagtgagatatatgatcatatgatgagtggggttcgggtgagtgcgtacttgaagtaggatcccgctttcactcattcattcattggcctttaaaccgggaaattttcgcgaggagatggagggaagcaagcagggtgacgagtgcagagtgccgcgagcgctttgtcaaaaggcaccgccgtaggcaaaaaaatcaatggccctgactgactcgatggtagtactactgtagagactagagagggttgctccccatatcttcgtgtgacttttactccagcattgcatttccgtcattgagacgttaattaatagcagctttcgggacagatgactgtggccatgtttcgtcacggccgcttcgtgccagctgggggtactatagtactgtgattttgttagtaaaaactttcattaggccaccattgacgaccgggccttcgcttttgctgcgctaattaaccatttcccggcgaccgaagggaacatgaacatgccccgacacatgagggcatgaggactagtgttctccctgtcgttcgttgacttgactagtgatagtttaaacgctcttcaactggaagagcggttactaccggttcactagctagctgctaatcgagctagttaccctatgaggtgacatgaagcgctcacggttactatgacggttagcttcacgactgttggtggcagtagcgtacgacttagctatagttccggacttacccttaagataacttcgtatagcatacattatacgaagttatgggcccacgcgtgaagagcggttaccagagctggtcacctttgtccaccaagatggaactgtcttcggccagaatggccatctggattcagcaggcctagaaggccatttatcgctatcaactttgtatagaaaagttgggccgaattcgagctcggtacggccagaatggcccggaccgggttacccggaccgaagcttgcatgcctgcagtgcagcgtgacccggtcgtgcccctctctagagataatgagcattgcatgtctaagttataaaaaattaccacatattttttttgtcacacttgtttgaagtgcagtttatctatctttatacatatatttaaactttactctacgaataatataatctatagtactacaataatatcagtgttttagagaatcatataaatgaacagttagacatggtctaaaggacaattgagtattttgacaacaggactctacagttttatctttttagtgtgcatgtgttctcctttttttttgcaaatagcttcacctatataatacttcatccattttattagtacatccatttagggtttagggttaatggtttttatagactaatttttttagtacatctattttattctattttagcctctaaattaagaaaactaaaactctattttagtttttttatttaataatttagatataaaatagaataaaataaagtgactaaaaattaaacaaataccctttaagaaattaaaaaaactaaggaaacatttttcttgtttcgagtagataatgccagcctgttaaacgccgtcgacgagtctaacggacaccaaccagcgaaccagcagcgtcgcgtcgggccaagcgaagcagacggcacggcatctctgtcgctgcctctggacccctctcgagagttccgctccaccgttggacttgctccgctgtcggcatccagaaattgcgtggcggagcggcagacgtgagccggcacggcaggcggcctcctcctcctctcacggcaccggcagctacgggggattcctttcccaccgctccttcgctttcccttcctcgcccgccgtaataaatagacaccccctccacaccctctttccccaacctcgtgttgttcggagcgcacacacacacaaccagatctcccccaaatccacccgtcggcacctccgcttcaaggtacgccgctcgtcctcccccccccccctctctaccttctctagatcggcgttccggtccatgcatggttagggcccggtagttctacttctgttcatgtttgtgttagatccgtgtttgtgttagatccgtgctgctagcgttcgtacacggatgcgacctgtacgtcagacacgttctgattgctaacttgccagtgtttctctttggggaatcctgggatggctctagccgttccgcagacgggatcgatttcatgattttttttgtttcgttgcatagggtttggtttgcccttttcctttatttcaatatatgccgtgcacttgtttgtcgggtcatcttttcatgcttttttttgtcttggttgtgatgatgtggtctggttgggcggtcgttctagatcggagtagaattctgtttcaaactacctggtggatttattaattttggatctgtatgtgtgtgccatacatattcatagttacgaattgaagatgatggatggaaatatcgatctaggataggtatacatgttgatgcgggttttactgatgcatatacagagatgctttttgttcgcttggttgtgatgatgtggtgtggttgggcggtcgttcattcgttctagatcggagtagaatactgtttcaaactacctggtgtatttattaattttggaactgtatgtgtgtgtcatacatcttcatagttacgagtttaagatggatggaaatatcgatctaggataggtatacatgttgatgtgggttttactgatgcatatacatgatggcatatgcagcatctattcatatgctctaaccttgagtacctatctattataataaacaagtatgttttataattattttgatcttgatatacttggatgatggcatatgcagcagctatatgtggatttttttagccctgccttcatacgctatttatttgcttggtactgtttcttttgtcgatgctcaccctgttgtttggtgttacttctgcaggtcgactttaacttagcctaggatccatggcggccaatgcgggcggcggtggagcgggaggaggcagcggcagcggcagcgtggctgcgccggcggtgtgccgccccagcggctcgcggtggacgccgacgccggagcagatcaggatgctgaaggagctctactacggctgcggcatccggtcgcccagctcggagcagatccagcgcatcaccgccatgctgcggcagcacggcaagatcgagggcaagaacgtcttctactggttccagaaccacaaggcccgcgagcgccagaagcgccgcctcaccagcctcgacgtcaacgtgcccgccgccggcgcggccgacgccaccaccagccaactcggcgtcctctcgctgtcgtcgccgccgccttcaggcgcggcgcctccctcgcccaccctcggcttctacgccgccggcaatggcggcggatcggctgtgctgctggacacgagttccgactggggcagcagcggcgctgctatggccaccgagacatgcttcctgcaggactacatgggcgtgacggacacgggcagctcgtcgcagtggccacgcttctcgtcgtcggacacgataatggcggcggccgcggcgcgggcggcgacgacgcgggcgcccgagacgctccctctcttcccgacctgcggcgacgacggcggcagcggtagcagcagctacttgccgttctggggtgccgcgtccacaactgccggcgccacttcttccgttgcgatccaacagcaacaccagctgcaggagcagtacagcttttacagcaacagcaacagcacccagctggccggcaccggcaaccaagacgtatcggcaacagcagcagcagccgccgccctggagctgagcctcagctcatggtgctccccttaccctgctgcagggagtatgtgagagcaacgcgagctgccactgctcttcactgatgtctctggaatggaaggaggaggaagtgagaacagatcattcgacaaagcagcattagtccgttgatcggtggaagaccactcgtcagtgttgagttgaatgtttgatcaataaaatacggcaatgctgtaagggttgttttttatgccattgataatacactgtactgttcagttgttgaactctatttcttagccatgccaagtgcttttcttattttgaataacattacagcaaaaagttgaaagacaaaaaaaaaaacccccgaacagagtgctttgggtcccaagcttctttagactgtgttcggcgttccccctaaatttctccccctatatctcactcacttgtcacatcagcgttctctttccccctatatctccacgctctacagcagttccacctatatcaaacctctataccccaccacaacaatattatatactttcatcttcaactaactcatgtaccttccaatttttttctactaataattatttacgtgcacagaaacttagcaaggagagagagagcgggaatttaaatgctcggcgttaggcttttagtccgctaggtggctagaccgaggttaggacgctagttcactaggggcctagtggtgttttaagacgtcacggtcaccacgcgtggaccgaagcttgcatgcctgcagtgcagcgtgacccggtcgtgcccctctctagagataatgagcattgcatgtctaagttataaaaaattaccacatattttttttgtcacacttgtttgaagtgcagtttatctatctttatacatatatttaaactttactctacgaataatataatctatagtactacaataatatcagtgttttagagaatcatataaatgaacagttagacatggtctaaaggacaattgagtattttgacaacaggactctacagttttatctttttagtgtgcatgtgttctcctttttttttgcaaatagcttcacctatataatacttcatccattttattagtacatccatttagggtttagggttaatggtttttatagactaatttttttagtacatctattttattctattttagcctctaaattaagaaaactaaaactctattttagtttttttatttaataatttagatataaaatagaataaaataaagtgactaaaaattaaacaaataccctttaagaaattaaaaaaactaaggaaacatttttcttgtttcgagtagataatgccagcctgttaaacgccgtcgacgagtctaacggacaccaaccagcgaaccagcagcgtcgcgtcgggccaagcgaagcagacggcacggcatctctgtcgctgcctctggacccctctcgagagttccgctccaccgttggacttgctccgctgtcggcatccagaaattgcgtggcggagcggcagacgtgagccggcacggcaggcggcctcctcctcctctcacggcaccggcagctacgggggattcctttcccaccgctccttcgcacgtaagcgcttacgcaccgaacaacgtaagcgcttacgcaccgaacaacgtaagcgcttacgctttcccttcctcgcccgccgtaataaatagacaccccctccacaccctctttccccaacctcgtgttgttcggagcgcacacacacacaaccagatctcccccaaatccacccgtcggcacctccgcttcaaggtacgccgctcgtcctcccccccccccctctctaccttctctagatcggcgttccggtccatgcatggttagggcccggtagttctacttctgttcatgtttgtgttagatccgtgtttgtgttagatccgtgctgctagcgttcgtacacggatgcgacctgtacgtcagacacgttctgattgctaacttgccagtgtttctctttggggaatcctgggatggctctagccgttccgcagacgggatcgatttcatgattttttttgtttcgttgcatagggtttggtttgcccttttcctttatttcaatatatgccgtgcacttgtttgtcgggtcatcttttcatgcttttttttgtcttggttgtgatgatgtggtctggttgggcggtcgttctagatcggagtagaattctgtttcaaactacctggtggatttattaattttggatctgtatgtgtgtgccatacatattcatagttacgaattgaagatgatggatggaaatatcgatctaggataggtatacatgttgatgcgggttttactgatgcatatacagagatgctttttgttcgcttggttgtgatgatgtggtgtggttgggcggtcgttcattcgttctagatcggagtagaatactgtttcaaactacctggtgtatttattaattttggaactgtatgtgtgtgtcatacatcttcatagttacgagtttaagatggatggaaatatcgatctaggataggtatacatgttgatgtgggttttactgatgcatatacatgatggcatatgcagcatctattcatatgctctaaccttgagtacctatctattataataaacaagtatgttttataattattttgatcttgatatacttggatgatggcatatgcagcagctatatgtggatttttttagccctgccttcatacgctatttatttgcttggtactgtttcttttgtcgatgctcaccctgttgtttggtgttacttctgcaggtcgactttaacttagcctaggatccatggccactgtgaacaactggctcgctttctccctctccccgcaggagctgccgccctcccagacgacggactccacactcatctcggccgccaccgccgaccatgtctccggcgatgtctgcttcaacatcccccaagattggagcatgaggggatcagagctttcggcgctcgtcgcggagccgaagctggaggacttcctcggcggcatctccttctccgagcagcatcacaaggccaactgcaacatgatacccagcactagcagcacagtttgctacgcgagctcaggtgctagcaccggctaccatcaccagctgtaccaccagcccaccagctcagcgctccacttcgcggactccgtaatggtggcttcctcggccggtgtccacgacggcggtgccatgctcagcgcggccgccgctaacggtgtcgctggcgctgccagtgccaacggcggcggcatcgggctgtccatgattaagaactggctgcggagccaaccggcgcccatgcagccgagggtggcggcggctgagggcgcgcaggggctctctttgtccatgaacatggcggggacgacccaaggcgctgctggcatgccacttctcgctggagagcgcgcacgggcgcccgagagtgtatcgacgtcagcacagggtggagccgtcgtcgtcacggcgccgaaggaggatagcggtggcagcggtgttgccggcgctctagtagccgtgagcacggacacgggtggcagcggcggcgcgtcggctgacaacacggcaaggaagacggtggacacgttcgggcagcgcacgtcgatttaccgtggcgtgacaaggcatagatggactgggagatatgaggcacatctttgggataacagttgcagaagggaagggcaaactcgtaagggtcgtcaagtctatttaggtggctatgataaagaggagaaagctgctagggcttatgatcttgctgctctgaagtactggggtgccacaacaacaacaaattttccagtgagtaactacgaaaaggagctcgaggacatgaagcacatgacaaggcaggagtttgtagcgtctctgagaaggaagagcagtggtttctccagaggtgcatccatttacaggggagtgactaggcatcaccaacatggaagatggcaagcacggattggacgagttgcagggaacaaggatctttacttgggcaccttcagcacccaggaggaggcagcggaggcgtacgacatcgcggcgatcaagttccgcggcctcaacgccgtcaccaacttcgacatgagccgctacgacgtgaagagcatcctggacagcagcgccctccccatcggcagcgccgccaagcgcctcaaggaggccgaggccgcagcgtccgcgcagcaccaccacgccggcgtggtgagctacgacgtcggccgcatcgcctcgcagctcggcgacggcggagccctggcggcggcgtacggcgcgcactaccacggcgccgcctggccgaccatcgcgttccagccgggcgccgccagcacaggcctgtaccacccgtacgcgcagcagccaatgcgcggcggcgggtggtgcaagcaggagcaggaccacgcggtgatcgcggccgcgcacagcctgcaggacctccaccacctgaacctgggcgcggccggcgcgcacgactttttctcggcagggcagcaggccgccgccgctgcgatgcacggcctgggtagcatcgacagtgcgtcgctcgagcacagcaccggctccaactccgtcgtctacaacggcggggtcggcgacagcaacggcgccagcgccgtcggcggcagtggcggtggctacatgatgccgatgagcgctgccggagcaaccactacatcggcaatggtgagccacgagcaggtgcatgcacgggcctacgacgaagccaagcaggctgctcagatggggtacgagagctacctggtgaacgcggagaacaatggtggcggaaggatgtctgcatgggggactgtcgtgtctgcagccgcggcggcagcagcaagcagcaacgacaacatggccgccgacgtcgggcatggcggcgcgcagctcttcagtgtctggaacgacacttaagcgtacctagtggtacctgacatcttatagtctgcaacctctcgtgtctgaattcctatctttatcaagtgttattgcttccacgactataggacagctttcgtcgaaagcttttgctcatgtgatctcgaaggattcatctagtctgatttttcgtgacttgtatcggttttattggattcatccaacatatatcaataaaaaatgagttgtgtttcctttcttcctagttcagttaaaattatttccctcctgcgcttgtgctgtaattgtctgtgtacctgttgtttgtgactgtgttagttcccttggatatgatttcgtatttgatatgtacatggagatagcttagcttcattattggagtatgaagttagtatgacatagtcactctcctggaaaattgacactgcaaaccatatttttattctgaaccacaaatcctagtcagtccgctggcatatgccgtccgtttgctgaatccagaacgtgggtttggagatgtacggctgagatgcctctatgcgaaggggatttcgtggtgaaacgagatgggagtagagcaacgcccgtggaagatgcttcaaacttccacacttttgagcaacgatcggcagtagtaaggtagacgatttcaagatcaaagcatatgaagataaacaacatcaacaacaaaatttgttggggttctatagagagaaacagagctacatacatacactgttttgtatctaccatctgagatgatgaaaagatgaaaaactaaagaatgccccggcgccaacgccaggacacgccgcgcgcgcgtcacccgagccatctcttgacccagccggcgctgtatatttacacacgttgcagcatcgatcaccacctgttcgatcgcgtcgccgtcaccggcgcgccgcgacttattgaactagtctagggcgcggctaacaacctagcttagattgccttgtctaaacccttaggctaacgcgccacggttaccggttaccgaattcgagctcggtaccctggttcacaaactcaatacaacacacagtggagtagggtattacgctccggcggcccgaaccactctaaatccttgtgtcctcgtgtgctcttccaccattaatgactgtaattgcagggacacgaagagttgtagcgcttttgccaacaagatccgctatatgctagtagagtggaacctgcacagcaacaagcatccaataatctgagaataagaattatgtgtggtgatggttctcatctctgcaactcgccattttcgcgagagaaccaaatccaagttggtgaagatcatgatttgggctcatgggctggcatagtagctattacctttgcaattgtggttcgaatctatccgatattctccttttcagggagagctaatgcttatgcttattgggtattttggtttgacactgcttcacgcccaaaaaaaggcaactatgtctgagttggatatggcccaaaaaaaggcagctatgtctgagttggatatggaagtcttctttcgtttagggtgaagtaagaccaagctcatgagcttattatcttaggtcggaacaaattagttgataggcatggcacatttatcaaattataatgattttaacagaaaagcaacacctctttttcagcagcaccagctttgcaagctgcaattgacactccaagcatagtatttgctccaaactcagcctgcatttcgcacaatatcatatctatttccatttggataaaatatattttccagaaatatgggaacagaatcaagatacagaaaaaagttgtggtagtagtggtaagtggaaacacaagtacagtgaaaagatagcattatttctgaacagtcaaattaaccgaaataagtagtatcacatactgcccctaaattgactacacccaatgtaaagaattgcttgagcatattgagccatcagttgtttgtttgtgtaacggatttgacaatgcagagttcaggagcaaaaaaccgcaaaggagagaaagagggaaaggatctcctagtatcccaccttgtggcgcgccctgtcaagtgcatgatggcctggtcgatctgcgtctgctgctgcggttccatcccaacgagtgcctccgacaccttgtcgttgatcacccgcaccgcgtaggcgacccccctggcgaggaacttccgcctctcggaggccccggccgcgtcggcggcggcgccctcgagcgcgcccacgctagccgtagatgctcggtgcacggccttgttggtgtgcaactcgacctcaacggccggtgcgctacgcccgtcaaggatctggcgcgcccgcaccctcgtgatcacggtgggcgcctcccgcctcatgtggccgacgatgaaaagcgccgggttaggggccttggcgcgcaccgccgtattcagggcctcctcgctcttgcgcgagagcaggtgcttccccaggtactcctgcactgacaaggctgccacagcggtggaatttgtcctcacgacttcgccacgtcgtcctcacctccctggcttcccacgactccgccgtatcgaggtgctcggtgggtcgtcttaatccgaagtccgaactaggaagacgagacagagaggtctgaggaatgggcctcgtttgatgttgagctgaattatttttccagcataagcccaggtcttggtccatgaacaaaattactagaaacccagcccagtactacgatctaaaagagggactgccactggatagctctctctagcattctccacgctccaatacagcggcgtcgtgtctatccgggtctatccgcgaacacgtgagaactctccagaaactgctttctcctccacttcatctctctcgctttccctctataaaaagaccccttctaggaattgagggagacagcaagcaccaagcagcgatccgaagctcaatcaattcactcaaacctcttccccaaatcttcgattagatcttcgttgacaagaagactagaaccgaacctgacatgtccaacctgctcacggttcaccagaaccttccggctcttccagtggacgcgacgtccgatgaagtcaggaagaacctcatggacatgttccgcgacaggcaagcgttcagcgagcacacctggaagatgctgctctccgtctgccgctcctgggctgcatggtgcaagctgaacaacaggaagtggttccccgctgagcccgaggacgtgagggattaccttctgtacctgcaagcgcgaggtttgtttctgcttctacctttgatatatatataataattatcattaattagtagtaatataatatttcaaatatttttttcaaaataaaagaatgtagtatatagcaattgcttttctgtagtttataagtgtgtatattttaatttataacttttctaatatatgaccaaaacatggtgatgcctaggtctggcagtgaagaccatccagcaacaccttggacaactgaacatgcttcacaggcgctccggcctcccgcgccccagcgactcgaacgccgtgagcctcgtcatgcgccgcatcaggaaggaaaacgtcgatgccggcgaaagggcaaagcaggccctcgcgttcgagaggaccgatttcgaccaggtccgcagcctgatggagaacagcgacaggtgccaggacattaggaacctggcgttcctcggaattgcatacaacacgctcctcaggatcgcggaaattgcccgcattcgcgtgaaggacattagccgcaccgacggcggcaggatgcttatccacattggcaggaccaagacgctcgtttccaccgcaggcgtcgaaaaggccctcagcctcggagtgaccaagctcgtcgaacgctggatctccgtgtccggcgtcgcggacgacccaaacaactacctcttctgccgcgtccgcaagaacggggtggctgcccctagcgccaccagccaactcagcacgagggccttggaaggtattttcgaggccacccaccgcctgatctacggcgcgaaggatgacagcggtcaacgctacctcgcatggtccgggcactccgcccgcgttggagctgctagggacatggcccgcgccggtgtttccatccccgaaatcatgcaggcgggtggatggacgaacgtgaacattgtcatgaactacattcgcaaccttgacagcgagacgggcgcaatggttcgcctcctggaagatggtgactgaggtacccaacctagacttgtccatcttctggattggccaacttaattaatgtatgaaataaaaggatgcacacatagtgacatgctaatcactataatgtgggcatcaaagttgtgtgttatgtgtaattactagttatctgaataaaagagaaagagatcatccatatttcttatcctaaatgaatgtcacgtgtctttataattctttgatgaaccagatgcatttcattaaccaaatccatatacatataaatattaatcatatataattaatatcaattgggttagcaaaacaaatctagtctaggtgtgttttgcgatccgatcgagtctaaaaacggcccctaactaacgcttagttgcccgctagattagtcccccgttagtgcctagttagacacacgacgaactaggggctagcacgcgttacccgggataacttcgtatagcatacattatacgaagttatgaattccggaccgggttaccgaattcctgcccttaaggccaattgttcaagattcattcaacaattgaaacatctcccatgattaaatcagtataaggttgctatggtcttgcttgacaaagtttttttttgagggaatttcaactaaatttttgagtgaaactatcaaatactgattttaaaaaatttttataaaaggaagcgcagagataaaaggccatctatgctacaaaagtacccaaaaatgtaatcctaaagtatgaattgcattttttttttgtttggacgaaaggaaaggagtattaccacaagaatgatatcatcttcatatttagatcttttttgggtaaagcttgagattctctaaatatagagaaatcagaagaaaaaaaaaccgtgttttggtggttttgatttctagcctccacaataactttgacggcgtcgacaagtctaacggacaccaagcagcgaaccaccagcgccgagccaagcgaagcagacggccgagacgttgacaccttcggcgcggcatctctcgagagttccgctccggcgctccacctccaccgctggcggtttcttattccgttccgttccgcctcctgctctgctcctctccacaccacacggcacgaaaccgttacggcaccggcagcacccagcacgggagaggggattcctttcccaccgttccttccctttccgccccgccgctataaatagccagccccatccccagcttttttccccaatctcatctcctctctcctgttgttcggagcacacgcacaatccgatcgatccccaaatccccttcgtctctcctcgcgagcctcgtggatcccagcttcaaggtacggcgatcgatcatcccccctccttctctctaccttcttttctctagactacatcggatggcgatccatggttagggcctgctagtttcccttcctgttttgtcgatggctgcgaggcacaatagatctgatggcgttatgacggctaacttgtcatgttgttgcgatttatagtccctttaggagatcagtttaatttctcggatggttcgagatcggtggtccatggttagtaccctaagatccgcgctgttagggttcgtagatggaggcgacctgttctgattgttaacttgtcagtacctgggaaatcctgggatggttctagctcgtccgcagatgagatcgatttcatgatcctctgtatcttgtttcgttgcctaggttccgtctaatctatccgtggtatgatgtagatgttttgatcgtgctaactacgtcttgtaaagttaattgtcaggtcataatttttagcatgcctttttttttgtttggttttgtctaattgggctgtcgttctagatcagagtagaagactgttccaaactacctgctggatttattgaacttggatctgtatgtgtgtcacatatcttcataaattcatgattaagatggattgaaatatcttttatctttttggtatggatagttctatatgttggtgtggctttgttagatgtatacatgcttagatacatgaagcaacgtgctgctactgtttagtaattgctgttcatttgtctaataaacagataaggatatgtatttatgttgctgttggttttgctggtactttgttggatacaaatgcttcaatacagaaaacagcatgctgctacgatttaccatttatctaatcttatcatatgtctaatctaataaacaaacatgcttttaaattatcttcatatgcttggatgatggcatacacagcggctatgtgtggttttttaaatacccagcatcatgggcatgcatgacactgctttaatatgctttttatttgcttgagactgtttcttttgtttatactgaccctttagttcggtgactcttctgcaggtcgactttaacttagcctaggatccatggcccagtccaagcacggcctgaccaaggagatgaccatgaagtaccgcatggagggctgcgtggacggccacaagttcgtgatcaccggcgagggcatcggctaccccttcaagggcaagcaggccatcaacctgtgcgtggtggagggcggccccttgcccttcgccgaggacatcttgtccgccgccttcatgtacggcaaccgcgtgttcaccgagtacccccaggacatcgtcgactacttcaagaactcctgccccgccggctacacctgggaccgctccttcctgttcgaggacggcgccgtgtgcatctgcaacgccgacatcaccgtgagcgtggaggagaactgcatgtaccacgagtccaagttctacggcgtgaacttccccgccgacggccccgtgatgaagaagatgaccgacaactgggagccctcctgcgagaagatcatccccgtgcccaagcagggcatcttgaagggcgacgtgagcatgtacctgctgctgaaggacggtggccgcttgcgctgccagttcgacaccgtgtacaaggccaagtccgtgccccgcaagatgcccgactggcacttcatccagcacaagctgacccgcgaggaccgcagcgacgccaagaaccagaagtggcacctgaccgagcacgccatcgcctccggctccgccttgccctccggactcagatctcgatagggtaccaatggccagttaacagatccagctgctgctgttctagggttcacaagtctgcctatttgtcttccccaatggagctatggttgtctggtctggtccttggtcgtgtcccgtttcattgtgtactatttacctgtaatgtgtatccttaagtctggtttgatggtgtctgaaacgttttgctgtggtagagcagcatggaagaactataatgaataagtgatccctaatcattgtgtccaaattttgcttctgctatacccttttgtgctgtttcttatgttttgcttaaaaatttgatctgacaaacaaatttgtctaaattatgctcttgttctgactgtgtactgtacacatttgtattgctaccggtttggcacatagttttctctttgattgcagatcaaacccttctgattgcagattgcttggctatggctgatgtgctcactgttcttctttagcttgtatattgctgatggtggcttggctacggctgaaaaagttgctgctgcgccgacttggcaactgttgctccagtaatgctttgtcctctcttcctagccgccgacttggcacttggcagctgttgctcctgtaatgcgttgttatctcttatctcttgagatgtactatgattttgaggctgtttgacttgtgccagattgccagtgctgatgctatattatctcaggtttttatgctagtatatgttttactgtgtgctgcctgtgtcgagttacgtaatctattgaaccgctatgcgtgttgatgccctgttgttgcttgccagattgatgcccctgttgcttgcagcttgcaagctgtagtgaaatcctaaaattcgaaaccaaatctattctgaacttttgaagatctgtgatgtccggaagaaaagattcaaacagataaacgggactctccagaatctataaaataaatgatcgacaaacgctttgctttggtaggcttcctagttagttagcggaccgggatccgacggcgtcttcaccgccccgccgccgcccgagccggacttgtcgctgccgccgccgctgctcatcttgcgcgcttgtgtccctccctcagtccctgcgttcgcggatcgcgggcgggtgcgacccgtttggactccggccggtagccttcgtgccgacctcgctcggtccaccggtttgtcggggacccacatgtcagtgaaggtacgcgtccacgtccacagaccctactaccccagacgagtccaaatcgctgttccctcacactctcgtgtaccagcgcgcggcggaaagcacctttccaacaaccgccgacacgtcggtcccacgtcggcatgctccaccggtcagtgtttggcgtgtacggctcccggcgacgaacgagtgtggcctaagctttcctactcccatcccatctgagccacacatctctctcacgccacgcgcacaaaacagccaggctcccacgcgcatcaaccggctctccctttccgtgccactcgcccccaagccccaaaccctcgccgccgcctccgagacagccgccgccacctaggccatggccaccgccgccgccgcgtctaccgcgctcactggcgccactaccgctgcgcccaaggcgaggcgccgggcgcacctcctggccacccgccgcgccctcgccgcgcccatcaggtgctcagcggcgtcacccgccatgccgatggctcccccggccaccccgctccggccgtggggccccaccgagccccgcaagggtgctgacatcctcgtcgagtccctcgagcgctgcggcgtccgcgacgtcttcgcctaccccggcggcgcgtcgatggagatccaccaggcactcacccgctcccccgtcatcgccaaccacctcttccgccacgagcaaggggaggcctttgccgcctccggctacgcgcgctcctcgggccgcgtcggcgtctgcatcgccacctccggccccggcgccaccaacctagtctccgcgctcgccgacgcgctgctcgattccgtcccgatggtcgccatcacgggacaggtggcgcgacgcatgattggcaccgacgccttccaggagacgcccatcgtcgaggtcacgcgctccatcaccaagcacaactacctggtcctcgacgtcgacgacatcccccgcgtcgtgcaggaggctttcttcctcgcctcctctggtcgaccagggccggtgcttgtcgacatccccaaggacatccagcagcagatggcggtgcctgtctgggacaagcccatgagtctgcctgggtacattgcgcgccttcccaagccccctgcgactgagttgcttgagcaggtgctgcgtcttgttggtgaatcgcggcgccctgttctttatgtgggcggtggctgcgcagcatctggtgaggagttgcgacgctttgtggagctgactggaatcccggtcacaactactcttatgggcctcggcaacttccccagcgacgacccactgtctctgcgcatgctaggtatgcatgggacggtgtatgcaaattatgcagtggataaggccgatctgttgcttgcacttggtgtgcggtttgatgatcgcgtgacagggaagattgaggcttttgcaagcagggctaagattgtgcacgttgatattgatccggctgagattggcaagaacaagcagccacatgtgtccatctgtgcagatgttaagcttgctttgcagggcatgaatgctcttcttgaaggaagcacatcaaagaagagctttgactttggctcatggaacgatgagttggatcagcagaagagggaattcccccttgggtataaaacatctaatgaggagatccagccacaatatgctattcaggttcttgatgagctgacgaaaggcgaggccatcatcggcacaggtgttgggcagcaccagatgtgggcggcacagtactacacttacaagcggccaaggcagtggttgtcttcagctggtcttggggctatgggatttggtttgccggctgctgctggtgcttctgtggcaaacccaggtgtcactgttgttgacatcgatggagatggtagctttctcatgaacgttcaggagctagctatgatccgaattgagaacctcccagtgaaggtctttgtgctaaacaaccagcacctggggatggtggtgcagttggaggacaggttctataaggccaacagagcgcacacatacttgggaaacccagagaatgaaagtgagatatatccagatttcgtgacgatcgccaaagggttcaacattccagccgtccgtgtgacaaagaagaacgaagtccgcgcagcgataaagaagatgctcgagactccagggccgtacctcttggatataatcgtcccacaccaggagcatgtgttgcctatgatccctagtggtggggctttcaaggatatgatcctggatggtgatggcaggactgtgtactgacttcgaataggtacccggggatcctctagtgccgtgggtcgtttaagctgccgctgtacctgtgtcgtctggtgccttctggtgtacctgggaggttgtcgtctatcaagtatctgtggttggtgtcatgagtcagtgagtcccaatactgttcgtgtcctgtgtgcattatacccaaaactgttatgggcaaatcatgaataagcttgatgttcgaacttaaaagtctctgctcaatatggtattatggttgtttttgttcgtctcctaatatttgcctgggatcaaattttattggctggtgttcatttgacctccatgttcttgctaggctccattttttactctacagccataatatgtttgattgtttggtttgttctttgttgtacacctggttctgtcgagcttagttttcgacactggcttacagcttaacatgttgctattttattgggttctgattgctattttattgggttctgattgctagtttttgctgaatccaaaaaccatgttatttatttaagcgatccaggttattattatgatggtggctaagtttttttttttccaagggtaaattttctggattctccagtgtttctgtggccgaattcaatcactagagtcgacctgcaaagcttcggtccgggcctagaaggcccgcgccacttacgcttgattccgatgacttcgtaggttcctagctcaagccgctcgtgtccaagcgtcacttacgattagctaatgattacggcatctaggaccgactagttcttatgtgcttctagtctccaaatgtggttgatagttattttgctctaagatcaacagtaatgaagtataaatcatcgttgtggtgtgctactcggttaattgagcattaacacacacaaacatgacgaggatggtataatctccaaaaatgtgtactttgttaggtgggaccctatagccttgattaatgtgctatgttaggcatgcctggaaacgtgtgacgcatatgttttgtgaacctgttgatattatatgtgcttttatattaccatattttattaaaatactaatatttattactagtaagatataacattctatctagcttaaaaactaaccataaatattccataataactagatttaccaaactaatatactaaatatacataataaatacaaaattaacaagacaataatcaatatttatgagcttaatatatttagacattatggttggtcgacgataatcatgctaacttttcgtaattgcttgattgaaatatgcttagaataatgcctctttgttctacatggcaaatagggaccattatggtgtaacaccctgggaaccacaaacaccccgaaatgctactaaactacacaactaaccttcatatataaaatttcgacagcatctcctttgaaaatttgcatagacgtggaagcaacagagtataaacagatctgcgtttaaacgtgcaagcgctactagacaattcagtacattaaaaacgtccgcaatgtgttattaagttgtctaagcgtcaatttgtttacaccacaatatatcctgcca

SEQ ID NO: 263 - DNA, 22113 bp, Artificial Sequence
  PHP99676
gtttacccgccaatatatcctgtcaaacactgatagtttaaactgaaggcgggaaacgacaatctgatcatgagcggagaattaagggagtcacgttatgacccccgccgatgacgcgggacaagccgttttacgtttggaactgacagaaccgcaacgttgaaggagccactcagcaagctggtacgattgtaatacgactcactatagggcgaattgagcgctgtttaaacgctcttcaactggaagagcggttacgctgtttaaacgctcttcaactggaagagcggttactaccggttcactagctagctgctaatcgagctagttaccctatgaggtgacatgaagcgctcacggttactatgacggttagcttcacgactgttggtggcagtagcgtacgacttagctatagttccggacttacccttaagcgatttaaatctgcggttaccgaattcgagctcggtacctagtacccttgtacttttggtttcacctgcatagagaaaacccacaagaatatgacagtctgatttgtcagtctcattctcaagcaacatttctctatccgttactttcatggtgaataacacaatccatcatcaatactttgtgttactcagaaactgaaagttattccgagtcttgcatatctttggacctactcgtttttctaccattattgctgattgttaagctctcgctacttgaatcggcattgttggagtgggaaggttcaaaaaattggagttatgactagttgtctctttctatgtacgatggagaaaatgaataaacaactgagaaaatggctcttgtttagttgatgatgctcttaagctttccactggttgccatatatgatttgggcatttcactttgatcttaatgggccttgtaaagcccaagactcatgattatctttagttgatgctcttaattaggtgtgggcaaataattcaaactgtatgtacccgaccaaaaccaaagcaaaaataatcgaaccaaaccgaaaatttaaaaataaccgaatgaaaactaaatcctataactgaaagaactgaaaccgaatcaaaatatttaatgtaaccaaaaatatccgaaatataattatattgtcaaaaatattaataatttctagattaaataattaaaaatacttaaaaatttatataaaatagtaaaaatactcgaaaataaccacaaatattcaaaaacaaccgaaatatcccaaaatattcaaagcaaaataaccgaatggataccaaattttaaaaccgaaaaaactggaacaaaaccaaaatcgaaccaaaatttcaaaaatcgaataaatactaaactttagaacaaaaaaaaacgataaccgaatgtatacgaaccaaagccgaattagataaccgaacgtccaggactactcttaatctttccgccacttatgatttgggctattactttgtttataatgagccttttcaagctcaagttcatgattgtccgtgagatgagaaactgacttgttggattcgaaaccctagctagtattggttaatacttaatacataaatgacctgcattgacatcatcatccaagaaaataaaaattgtatgcttgagatatttagttttcctagctaggttttctttattttagtaccgaatctttaggtgtgccacgttaatttagacccattttttcatacttaccaactgagtctagtttaatcatgactataatcgtataaaatgattcagtcgacgtcattgcgaacgtatataaaatcatccaaattgacgtcattccaaagaggtaagcatgcttatctaagagtccgagcatactaaacaagacgacattttatttgcactccaaatcaaattttgtattgcctaaagaaaaacaatcaaactcaagtttcttaaaattaatttcattcaaactaatcactttcaatatctcacatattattcatgccatttctatttgtctaaacatgatttaaaaaaaaaagtaaaatacaaagattactatgcaaaaactctataaaaaaaaattcaaatttcttatttatttgtgacatcaaattttcaaaataatttttttaattatcggttgatccggtcagtcgataaaaacataaactttcagcgaccgttaaaactttcctactaccgatttagagaaaatcttagcttgaaacgtaattgtaacctgccttcatgcaagtcgcaagatatgtcatcctaagttgtatatgttttctcaaaagatgtatttacttgagaaaatacgtttcaacgttgatggacaaccaattaagaatcaagcacctttcgtaatcaatttaggcttatcgtctaaggtatactgatttacgacagttgactagacttataaggaacaaaataatagaatagtttctaaacacttcacctaatcatagagactaagatggtaattcgtaaacgacaaagcctagtgacactgtccattgtaaaattccacatcatattagtattaaacatatacatgtagtttcctgaacacatgtagtatcaaacacacttcgtggcttcttcctcgaaacctgcggccgcgctatagttccggacttacccttaagataacttcgtatagcatacattatacgaagttatgggcccacgcgtgaagagcggttaccagagctggtcacctttgtccaccaagatggaactgtcttcggccagaatggccatctggattcagcaggcctagaaggccatttatcgctatcaactttgtatagaaaagttgggccgaattcgagctcggtacggccagaatggcccggaccgaagcttgcggccgcacactgatagtttaaactgaaggcgggaaacgacaatctgatcatgagcggagaattaagggagtcacgttatgacccccgccgatgacgcgggacaagccgttttacgtttggaactgacagaaccgcaacgttgaaggagccactcagccgcgggtttctggagtttaatgagctaagcacatacgtcagaaaccattattgcgcgttcaaaagtcgcctaaggtcactatcagctagcaaatatttcttgtcaaaaatgctccactgacgttccataaattcccctcggtatccaattagagtctcatattcactctcccgggggatctcgactctagaggatcgctcaggaaggccgctgagatagaggcatggcggccaatgcgggcggcggtggagcgggaggaggcagcggcagcggcagcgtggctgcgccggcggtgtgccgccccagcggctcgcggtggacgccgacgccggagcagatcaggatgctgaaggagctctactacggctgcggcatccggtcgcccagctcggagcagatccagcgcatcaccgccatgctgcggcagcacggcaagatcgagggcaagaacgtcttctactggttccagaaccacaaggcccgcgagcgccagaagcgccgcctcaccagcctcgacgtcaacgtgcccgccgccggcgcggccgacgccaccaccagccaactcggcgtcctctcgctgtcgtcgccgccgccttcaggcgcggcgcctccctcgcccaccctcggcttctacgccgccggcaatggcggcggatcggctgtgctgctggacacgagttccgactggggcagcagcggcgctgccatggccaccgagacatgcttcctgcaggactacatgggcgtgacggacacgggcagctcgtcgcagtggccacgcttctcgtcgtcggacacgataatggcggcggccgcggcgcgggcggcgacgacgcgggcgcccgagacgctccctctcttcccgacctgcggcgacgacggcggcagcggtagcagcagctacttgccgttctggggtgccgcgtccacaactgccggcgccacttcttccgttgcgatccagcagcaacaccagctgcaggagcagtacagcttttacagcaacagcaacagcacccagctggccggcaccggcaaccaagacgtatcggcaacagcagcagcagccgccgccctggagctgagcctcagctcatggtgctccccttaccctgctgcagggagtatgtgagagcaacgcgagctgccactgctcttcactgatgtctctggaatggaaggaggaggaagtgagcatagcgttggtgcgttgctgtcaagggcgaattcacatggttaacctagacttgtccatcttctggattggccaacttaattaatgtatgaaataaaaggatgcacacatagtgacatgctaatcactataatgtgggcatcaaagttgtgtgttatgtgtaattactagttatctgaataaaagagaaagagatcatccatatttcttatcctaaatgaatgtcacgtgtctttataattctttgatgaaccagatgcatttcattaaccaaatccatatacatataaatattaatcatatataattaatatcaattgggttagcaaaacaaatctagtctaggtgtgttttgcgaatgcggccgccaccgcggtggagctcgaattccggtccgggcctagaaggccagcttcaagtttgtacaaaaaagcaggctccggccagaatggcccggaccgggttaccgaattcgagctcggtacccgcacgcgggggtgttccatcgtgtctgccaaaaaccttttgctactgtatgtacggtccaaacgtggtttggtgatgttgcgtcttttcacgaccgtcgtgggccgacagcgtcgtcctaggttcctttcttgccgatccgttcggcaaggacttggtcattcgtcctgtctcgtagacttgctcggcagggacttggtcggtcaccccgtctcgcagacttgctcgtccgggacttggtcgttcgcccctcctcgcatacttgctcgacggggacttggttgctggtcccgtctcgcaaacttgctcgatgaggacttggacatttgctccgccgagtagacttgctcggcggggacttggtcgttcgccccgcatcatagacttgctcgacacagactcagttggtaaatgggccagagaggggtttgtgggggtatcccgttcttgggtacttgacacaattatttgtagtttttacctgttaaaacttcaaatatgatgttcatattcatatctttattggtatcactcttcgtgtatacatttatttatcctatgtacatgcaatgtaaatgatacatagtgcatattgaccttatttttaacatgtacttctttcaaagcaaaccacccgcgaagtgtcacaatgcatacatccttcggtgtcgagggacctcatcatgaggcccctgcccccctaagtctagcttccaatgtcatttaaggaagaagatgagtttcgaggcctttagggcctctgaggttctaccgaacaatctaggttatctttgtctcttagatcccctgcatcagacccctcttggacctcgaccttggagcccttcaaggttctgaagccctcttgagatctatggctcttaatgtgggaacccaagcttctctcttgactaagtacaagaatgctccacattgaggcatacaactagttgtaacccccgggcaagaagtaccatgggagtatggtcccatagccacaactgtctctacttaagacgaccatgtgatactaatgttccgaataaagcttttgcacatcacattaatgtgatggatgatattgtggtcaagcaggcatatggtagccaccacaaaggatatgaagcatacccaaatccactatgaggagtgtgtcgcgtacctatgccacacctaaatgtgctaatttacctgtaagcattataaaatataagcaattacaccgtatctgatggcatggactcgagtacataactatgatatgatatatttctcactgccgcaagatatgcatattacaatgacatgttcaagcgccattgtggtccgcgtagagtcctcgtctctaacaagatgaagtaatcgagcatgttcactacgaaccaacatgtgatcctcctcttcttcgagctataaaatattcatccagcttaaatttcaaaatatgtgtgtcagagttaaaaaaatattcgattcaaatctaaatatcagttctgtattcatatcctagaatattcgaatctatatttgaattcagattacaaggtagtgaattgtgacatgtattcgttcctatccgatccgtcgtttttgagcactaggtgcggtcactgtgacgcgtggacttggcttcgcccactgccatcgtggacccacgtcatcagcaagtgtccatatccaccacccgacccgacgaccgcttgccgtccgatccgtgtgctcccgagggcaaggatggcatttcgccacgcgagatatttttcggtggcctgcacaggccggcagtgcagcggccaaaacgaggtcaggtcagtcacgctgggccccgcctcacgctcccgtcctgctccgggtcccaacaaagccgtccccgggaggtgctcgtgtgctcgtagcgcggtggcgaccccgatgccccgcatattccactgggcgtccgcgccgtcggatgggatcaggacggccgcggcggccccgcgctcggctataaagacgctgcgggggacgcattccctctccgtgctttcttagaggtgggttggcttctcctccccctccggttcgggttcgggttcgtgaggttctccggggttcgggttcgtgggtgagcggatcgagggatccatggccactgtgaacaactggctcgctttctccctctccccgcaggagctgccgccctcccagacgacggactccacactcatctcggccgccaccgccgaccatgtctccggcgatgtctgcttcaacatcccccaagattggagcatgaggggatcagagctttcggcgctcgtcgcggagccgaagctggaggacttcctcggcggcatctccttctccgagcagcatcacaaggccaactgcaacatgatacccagcactagcagcacagtttgctacgcgagctcaggtgctagcaccggctaccatcaccagctgtaccaccagcccaccagctcagcgctccacttcgcggactccgtaatggtggcttcctcggccggtgtccacgacggcggtgccatgctcagcgcggccgccgctaacggtgtcgctggcgctgccagtgccaacggcggcggcatcgggctgtccatgattaagaactggctgcggagccaaccggcgcccatgcagccgagggtggcggcggctgagggcgcgcaggggctctctttgtccatgaacatggcggggacgacccaaggcgctgctggcatgccacttctcgctggagagcgcgcacgggcgcccgagagtgtatcgacgtcagcacagggtggagccgtcgtcgtcacggcgccgaaggaggatagcggtggcagcggtgttgccggcgctctagtagccgtgagcacggacacgggtggcagcggcggcgcgtcggctgacaacacggcaaggaagacggtggacacgttcgggcagcgcacgtcgatttaccgtggcgtgacaaggcatagatggactgggagatatgaggcacatctttgggataacagttgcagaagggaagggcaaactcgtaagggtcgtcaagtctatttaggtggctatgataaagaggagaaagctgctagggcttatgatcttgctgctctgaagtactggggtgccacaacaacaacaaattttccagtgagtaactacgaaaaggagctcgaggacatgaagcacatgacaaggcaggagtttgtagcgtctctgagaaggaagagcagtggtttctccagaggtgcatccatttacaggggagtgactaggcatcaccaacatggaagatggcaagcacggattggacgagttgcagggaacaaggatctttacttgggcaccttcagcacccaggaggaggcagcggaggcgtacgacatcgcggcgatcaagttccgcggcctcaacgccgtcaccaacttcgacatgagccgctacgacgtgaagagcatcctggacagcagcgccctccccatcggcagcgccgccaagcgcctcaaggaggccgaggccgcagcgtccgcgcagcaccaccacgccggcgtggtgagctacgacgtcggccgcatcgcctcgcagctcggcgacggcggagccctggcggcggcgtacggcgcgcactaccacggcgccgcctggccgaccatcgcgttccagccgggcgccgccagcacaggcctgtaccacccgtacgcgcagcagccaatgcgcggcggcgggtggtgcaagcaggagcaggaccacgcggtgatcgcggccgcgcacagcctgcaggacctccaccacctgaacctgggcgcggccggcgcgcacgactttttctcggcagggcagcaggccgccgccgctgcgatgcacggcctgggtagcatcgacagtgcgtcgctcgagcacagcaccggctccaactccgtcgtctacaacggcggggtcggcgacagcaacggcgccagcgccgtcggcggcagtggcggtggctacatgatgccgatgagcgctgccggagcaaccactacatcggcaatggtgagccacgagcaggtgcatgcacgggcctacgacgaagccaagcaggctgctcagatggggtacgagagctacctggtgaacgcggagaacaatggtggcggaaggatgtctgcatgggggactgtcgtgtctgcagccgcggcggcagcagcaagcagcaacgacaacatggccgccgacgtcgggcatggcggcgcgcagctcttcagtgtctggaacgacacttaagcgtacgtgccggcctggctctccgaaagggcgtattccagcacactggcggccgttactagacccaacctagacttgtccatcttctggattggccaacttaattaatgtatgaaataaaaggatgcacacatagtgacatgctaatcactataatgtgggcatcaaagttgtgtgttatgtgtaattactagttatctgaataaaagagaaagagatcatccatatttcttatcctaaatgaatgtcacgtgtctttataattctttgatgaaccagatgcatttcattaaccaaatccatatacatataaatattaatcatatataattaatatcaattgggttagcaaaacaaatctagtctaggtgtgttttgcgaatgcggcctccgggcacccagctttcttgtacaaagtggccgttaacggatcggccagaatggcccggaccgggttaccccgcggttcaaagccaatgactgttgttaggtccagtttctaaggacgaatcatccaatcactggttctttctgaacaaaacaaagagctatagagttacgttactgtagccgagacagagcctgcaatctggttatgccacatactaggttctttcttaaagttgactcactctatcctaagttctacttacaaggagctacaacaaattggtcataaccggagagcgttcaaggaggtaatatcccatcttactctgtagcaaggctacaaaaggagagctaaagaactaggctacaaaaagagagctaaagaactaactatctagcaagactacagagctatagtgtagagatttcataaccggtgagcgttcaaggatactttgaagagaagaggtaatatctcaactagcaagactacaaaaaaatggagatataaaactaactgtctaacaagactacagagctatagtagagatagatacgttcgacacttaagcatgagaattcgagctcggtaccctggttcacaaactcaatacaacacacagtggagtagggtattacgctccggcggcccgaaccactctaaatccttgtgtcctcgtgtgctcttccaccattaatgactgtaattgcagggacacgaagagttgtagcgcttttgccaacaagatccgctatatgctagtagagtggaacctgcacagcaacaagcatccaataatctgagaataagaattatgtgtggtgatggttctcatctctgcaactcgccattttcgcgagagaaccaaatccaagttggtgaagatcatgatttgggctcatgggctggcatagtagctattacctttgcaattgtggttcgaatctatccgatattctccttttcagggagagctaatgcttatgcttattgggtattttggtttgacactgcttcacgcccaaaaaaaggcaactatgtctgagttggatatggcccaaaaaaaggcagctatgtctgagttggatatggaagtcttctttcgtttagggtgaagtaagaccaagctcatgagcttattatcttaggtcggaacaaattagttgataggcatggcacatttatcaaattataatgattttaacagaaaagcaacacctctttttcagcagcaccagctttgcaagctgcaattgacactccaagcatagtatttgctccaaactcagcctgcatttcgcacaatatcatatctatttccatttggataaaatatattttccagaaatatgggaacagaatcaagatacagaaaaaagttgtggtagtagtggtaagtggaaacacaagtacagtgaaaagatagcattatttctgaacagtcaaattaaccgaaataagtagtatcacatactgcccctaaattgactacacccaatgtaaagaattgcttgagcatattgagccatcagttgtttgtttgtgtaacggatttgacaatgcagagttcaggagcaaaaaaccgcaaaggagagaaagagggaaaggatctcctagtatcccaccttgtggcgcgccctgtcaagtgcatgatggcctggtcgatctgcgtctgctgctgcggttccatcccaacgagtgcctccgacaccttgtcgttgatcacccgcaccgcgtaggcgacccccctggcgaggaacttccgcctctcggaggccccggccgcgtcggcggcggcgccctcgagcgcgcccacgctagccgtagatgctcggtgcacggccttgttggtgtgcaactcgacctcaacggccggtgcgctacgcccgtcaaggatctggcgcgcccgcaccctcgtgatcacggtgggcgcctcccgcctcatgtggccgacgatgaaaagcgccgggttaggggccttggcgcgcaccgccgtattcagggcctcctcgctcttgcgcgagagcaggtgcttccccaggtactcctgcactgacaaggctgccacagcggtggaatttgtcctcacgacttcgccacgtcgtcctcacctccctggcttcccacgactccgccgtatcgaggtgctcggtgggtcgtcttaatccgaagtccgaactaggaagacgagacagagaggtctgaggaatgggcctcgtttgatgttgagctgaattatttttccagcataagcccaggtcttggtccatgaacaaaattactagaaacccagcccagtactacgatctaaaagagggactgccactggatagctctctctagcattctccacgctccaatacagcggcgtcgtgtctatccgggtctatccgcgaacacgtgagaactctccagaaactgctttctcctccacttcatctctctcgctttccctctataaaaagaccccttctaggaattgagggagacagcaagcaccaagcagcgatccgaagctcaatcaattcactcaaacctcttccccaaatcttcgattagatcttcgttgacaagaagactagaaccgaacctgacatgtccaacctgctcacggttcaccagaaccttccggctcttccagtggacgcgacgtccgatgaagtcaggaagaacctcatggacatgttccgcgacaggcaagcgttcagcgagcacacctggaagatgctgctctccgtctgccgctcctgggctgcatggtgcaagctgaacaacaggaagtggttccccgctgagcccgaggacgtgagggattaccttctgtacctgcaagcgcgaggtttgtttctgcttctacctttgatatatatataataattatcattaattagtagtaatataatatttcaaatatttttttcaaaataaaagaatgtagtatatagcaattgcttttctgtagtttataagtgtgtatattttaatttataacttttctaatatatgaccaaaacatggtgatgcctaggtctggcagtgaagaccatccagcaacaccttggacaactgaacatgcttcacaggcgctccggcctcccgcgccccagcgactcgaacgccgtgagcctcgtcatgcgccgcatcaggaaggaaaacgtcgatgccggcgaaagggcaaagcaggccctcgcgttcgagaggaccgatttcgaccaggtccgcagcctgatggagaacagcgacaggtgccaggacattaggaacctggcgttcctcggaattgcatacaacacgctcctcaggatcgcggaaattgcccgcattcgcgtgaaggacattagccgcaccgacggcggcaggatgcttatccacattggcaggaccaagacgctcgtttccaccgcaggcgtcgaaaaggccctcagcctcggagtgaccaagctcgtcgaacgctggatctccgtgtccggcgtcgcggacgacccaaacaactacctcttctgccgcgtccgcaagaacggggtggctgcccctagcgccaccagccaactcagcacgagggccttggaaggtattttcgaggccacccaccgcctgatctacggcgcgaaggatgacagcggtcaacgctacctcgcatggtccgggcactccgcccgcgttggagctgctagggacatggcccgcgccggtgtttccatccccgaaatcatgcaggcgggtggatggacgaacgtgaacattgtcatgaactacattcgcaaccttgacagcgagacgggcgcaatggttcgcctcctggaagatggtgactgaggtacccaacctagacttgtccatcttctggattggccaacttaattaatgtatgaaataaaaggatgcacacatagtgacatgctaatcactataatgtgggcatcaaagttgtgtgttatgtgtaattactagttatctgaataaaagagaaagagatcatccatatttcttatcctaaatgaatgtcacgtgtctttataattctttgatgaaccagatgcatttcattaaccaaatccatatacatataaatattaatcatatataattaatatcaattgggttagcaaaacaaatctagtctaggtgtgttttgcgatccgatatcgaattggccacggtaccagctgctgctgttctagggttcacaagtctgcctatttgtcttccccaatggagctatggttgtctggtctggtccttggtcgtgtcccgtttcattgtgtactatttacctgtaatgtgtatccttaagtctggtttgatggtgtctgaaacgttttgctgtggtagagcagcatggaagaactataatgaataagtgatccctaatcattgtgtccaaattttgcttctgctatacccttttgtgctgtttcttatgttttgcttaaaaatttgatctgacaaacaaatttgtctaaattatgctcttgttctgactgtgtactgtacacatttgtattgctaccggtttggcacatagttttctctttgattgcagatcaaacccttctgattgcagattgcttggctatggctgatgtgctcactgttcttctttagcttgtatattgctgatggtggcttggctacggctgaaaaagttgctgctgcgccgacttggcaactgttgctccagtaatgctttgtcctctcttcctagccgccgacttggcacttggcagctgttgctcctgtaatgcgttgttatctcttatctcttgagatgtactatgattttgaggctgtttgacttgtgccagattgccagtgctgatgctatattatctcaggtttttatgctagtatatgttttactgtgtgctgcctgtgtcgagttacgtaatctattgaaccgctatgcgtgttgatgccctgttgttgcttgccagattgatgcccctgttgcttgcagcttgcaagctgtagtgaaatcctaaaattccaaaccaaatctattctgaacttttgaagatctgtgatgtccggaagaaaagattcaaacagataaacgggactctccagaatctataaaataaatgatcgacaaacgctttgctttggtaggcttcaagcttggtcacccggtccgggcctagaaggccagcttcggccgccccgggcaactttattatacaaagttgatagataaatcagatatctggttcctaaggacccggcggaccgattaaactgattcggtccgacgcgttacctaataacttcgtatagcatacattatacgaagttattagctaactaactagtaagcttaagccatgggtcgacggatccgttaactagcgtggcatttggcaccgccgcacactatgcgagctaggagtgctagtttacagatgaaactatgaaaccaagaaaacacaattgtccgtagctagcgcgtggcgtcgtgtcaagcttcacacagtatcttcgttcttcactataaatcgcgcctgttgttcgtgagacccaccaccgtggataacagtcccctaataataagcgatcaacagcactgctgatggctgaacaccgaggcgccgccgcgcgtaaccatccgccggagcagcccgtcgtgccggcgaacgacgccttccccgaccgcgcccagcagctctgcctcgacgccgggcgcgcgctcgcgatgtgcggcgtgctcgtcgccgtccctcccgcattttacgcgtcgacgtcgcggacgacaccgcacttgccttcgtcggcttcgtcctctggatcatcggtgcgtggctgtgcctcctggcgctcacgcccttggctccacgggcggtgagggcgggcggggccgccgccagcaccttgctgatcaggtgcctgtccctttcatgaactactagcgcccgcgcccgcggccgccgggcacaagagaacacatcgatgttcgctgcgtacgtcagcaataaggcactctttgtcagtagtcgagtgcatatgttgggtgtttgccctgggagatttcaagtgttgtggccattatcccgcaggataaaaaatcggcggcttttggattgatacggaaaataacgatgtttcatgctcgtgttgtgtgtgtgacatcttgtcagccaagtttttaaccgttgctactccccctctgtgggctcagtgtgtggaccggaatacgtcgtacataggccgtagcctaagcccaatatgccgtttttcaggttggcctgtgtgacgacaagcgggtctcaaaagcccatcacgcaactggcctgcaattattggaggagagcgcgtcgagttggttccagaggctgcgtggtggggccggactctgcgacgacctctcgttcgcgtccgatttggttgccgtgagccgtgacgtaacgcctccttccgttcctccctatataagttccacccccgggtccggtttccccaagccccagtgacccccgatcccgatcgcgaaatctccgcacccgccggcaagggaccgaagcaagcctctctcccgaccgtcgcatcaaggtacgcgtccgctcgatctgtcctcttccttctcgatttgacttgctgtggtgcccgatcacgggatcagaatcgcaccagtgtagatttcgcatgttctaagatgtgttagtttccaggctaatccagttctcttgacgcccgatccgatcgagctccgtgtttatttcagcctaatcgtagtattcccctaaaatttcctcattagggggttcgcaagattgttggtcgacaggttcacttatgctcgatcgcttacttttagtcgattcatgctgcgtactattgttgccccccgtggttttatcttttctcgtgtgaaatccagtagatatagtagatatcgtagcattaggttttaattcaatcgattgattattgtatcatcaaaattgagaagttcgaatcatgcctatcatgctgcctcaaccgaaatcctgtatattgaagtttcaattcaattgattgatcattcattagattcaaccaaaatctagaaggttagatgacgcatgtcatgctgcctgcgtagtttacctttgatctgtttatgattaccttatcagtaggatatttgtgattttgggaagtagcactaactgattcatgctgacatgatgttccctttcagattatactgttgagtcctatctaattgatgctttgtatgctatatgaatacgtcatggtaaattagcagttaattagcatattagcaattgggcgtacctcatcaggattgctcttgtagatgtgtgtggtgatgtttcttgttcaattcatgttctgctttaaaagtatgtgttctctgtttgttaattaagattcatggttataatgatttggacctaattaatcagggttgcccttttagatgcgtggttacttgttgagttcatttttttcctgctatagttgtatgcgtttgttcattcatggttagatttgatttgtttcttctctattccatgccttccatatacttcaattgtagcttaacatgagatttctgtatatgcaggtcgaccgccggggatccacacgacaccatggcccagtccaagcacggcctgaccaaggagatgaccatgaagtaccgcatggagggctgcgtggacggccacaagttcgtgatcaccggcgagggcatcggctaccccttcaagggcaagcaggccatcaacctgtgcgtggtggagggcggccccttgcccttcgccgaggacatcttgtccgccgccttcatgtacggcaaccgcgtgttcaccgagtacccccaggacatcgtcgactacttcaagaactcctgccccgccggctacacctgggaccgctccttcctgttcgaggacggcgccgtgtgcatctgcaacgccgacatcaccgtgagcgtggaggagaactgcatgtaccacgagtccaagttctacggcgtgaacttccccgccgacggccccgtgatgaagaagatgaccgacaactgggagccctcctgcgagaagatcatccccgtgcccaagcagggcatcttgaagggcgacgtgagcatgtacctgctgctgaaggacggtggccgcttgcgctgccagttcgacaccgtgtacaaggccaagtccgtgccccgcaagatgcccgactggcacttcatccagcacaagctgacccgcgaggaccgcagcgacgccaagaaccagaagtggcacctgaccgagcacgccatcgcctccggctccgccttgccctccggactcagatctcgatagagtcaacctagacttgtccatcttctggattggccaacttaattaatgtatgaaataaaaggatgcacacatagtgacatgctaatcactataatgtgggcatcaaagttgtgtgttatgtgtaattactagttatctgaataaaagagaaagagatcatccatatttcttatcctaaatgaatgtcacgtgtctttataattctttgatgaaccagatgcatttcattaaccaaatccatatacatataaatattaatcatatataattaatatcaattgggttagcaaaacaaatctagtctaggtgtgttttgcgaattgcggcgcccttactttaacgcctctaaccaacacccctttatctttataaggaacaataaacagaatttgccccactgttctaaatcacctaataatatccccagctaaaaacaataaaggtttcctagaattaagacaagcatgactgttcctccaggagggtttggaacattgttgcagtcttgcagatacgggcgaagggtgagaaacagagcggagggctggaggtgacctcggtagtcgacgccggagttgagcttgacaacgacggggcggcccctgatggacttgaggaagtccgatggcgtcttcaccgtcccgccggcgcccgaggcgggcctgtcgctgccgccgccgccgctgctcatcttgcgcgctgtgcccccggcggtgtccctgtgttgcggatcgcgggtgggccaggtggatgcgagggcgacccgtttggactccggccggagccgccggatccctggtcggtgtcagtgccgtttactctgggccccacgtgtcagtaccgtctgtagatgacaacaacccgtcgtccacagtcatgtccaaaatatcctttcttcttttttttcgattcggatatctatcttccttttttttttccaaaaatcttcttgacgcaccagcgcgcacgtttgtggtaaacgccgacacgtcggtcccacgtcgatagaccccacccaccagtgagtagcgtgtacgtattcgggggtgacggacgtgtcgccgtcgtcttgctagtcccattcccatctgagccacacatctctgaacaaaaaaaaggagggaggcctccacgcacatccccctccgtgccacccgccccaaaccctcgcgccgcctccgagacagccgccgcaaccatggccaccgccgccgccgcgtctaccgcgctcactggcgccactaccgctgcgcccaaggcgaggcgccgggcgcacctcctggccacccgccgcgccctcgccgcgcccatcaggtgctcagcggcgtcacccgccatgccgatggctcccccggccaccccgctccggccgtggggccccaccgagccccgcaagggtgctgacatcctcgtcgagtccctcgagcgctgcggcgtccgcgacgtcttcgcctaccccggcggcgcgtccatggagatccaccaggcactcacccgctcccccgtcatcgccaaccacctcttccgccacgagcaaggggaggcctttgccgcctccggctacgcgcgctcctcgggccgcgtcggcgtctgcatcgccacctccggccccggcgccaccaacctagtctccgcgctcgccgacgcgctgctcgattccgtccccatggtcgccatcacgggacaggtggcgcgacgcatgattggcaccgacgccttccaggagacgcccatcgtcgaggtcacccgctccatcaccaagcacaactacctggtcctcgacgtcgacgacatcccccgcgtcgtgcaggaggctttcttcctcgcctcctctggtcgaccagggccggtgcttgtcgacatccccaaggacatccagcagcagatggcggtgcctgtctgggacaagcccatgagtctgcctgggtacattgcgcgccttcccaagccccctgcgactgagttgcttgagcaggtgctgcgtcttgttggtgaatcgcggcgccctgttctttatgtgggcggtggctgcgcagcatctggtgaggagttgcgacgctttgtggagctgactggaatcccggtcacaactactcttatgggcctcggcaacttccccagcgacgacccactgtctctgcgcatgctaggtatgcatgggacggtgtatgcaaattatgcagtggataaggccgatctgttgcttgcacttggtgtgcggtttgatgatcgcgtgacagggaagattgaggcttttgcaagcagggctaagattgtgcacgttgatattgatccggctgagattggcaagaacaagcagccacatgtgtccatctgtgcagatgttaagcttgctttgcagggcatgaatgctcttcttgaaggaagcacatcaaagaagagctttgactttggctcatggaacgatgagttggatcagcagaagagggaattcccccttgggtataaaacatctaatgaggagatccagccacaatatgctattcaggttcttgatgagctgacgaaaggcgaggccatcatcggcacaggtgttgggcagcaccagatgtgggcggcacagtactacacttacaagcggccaaggcagtggttgtcttcagctggtcttggggctatgggatttggtttgccggctgctgctggtgcttctgtggcaaacccaggtgtcactgttgttgacatcgatggagatggtagctttctcatgaacgttcaggagctagctatgatccgaattgagaacctcccagtgaaggtctttgtgctaaacaaccagcacctggggatggtggtgcagttggaggacaggttctataaggccaacagagcgcacacatacttgggaaacccagagaatgaaagtgagatatatccagatttcgtgacgatcgccaaagggttcaacattccagcggtccgtgtgacaaagaagaacgaagtccgcgcagcgataaagaagatgctcgagactccagggccgtacctcttggatataatcgtcccacaccaggagcatgtgttgcctatgatccctagtggtggggctttcaaggatatgatcctggatggtgatggcaggactgtgtactgactagctagtcagttaacagatctgccagatcctcggtgtacaaataacccgtcttatcctatgagacgggccggcgtcagtgtgttctggaggaatttttatgtcagagcctttttctttgtgtgcttgatgtagatgccaagggaagcttattggctgttgaagcttgatgcaaaataaattatggaactctgttttttgtttatctaataataactagcaaatatgcttccattgcattgaaactaacagccttttgtgtttccaagttttattttgtgacaatgtcatctatttcaattagttgtggaatcggaaacttgcaggactaacttggaaactccaatccctcagcatcctggactttttcctggtgtaatccatgtagatattattttaatcatcattttagttctggaggtttttccatctccggttttgctcccctttcttcaaaaaaaaaaaaaaaatgccgtaggcgccgcaacgcccacctgttgttcaaactcatgggcacgagtggctcgaagattttatacaacaattgctgtagtttcaccgttgctggtgaagaagcatttttttaaaaaaatatagtggtattcattttaattagtttagttgtgcagcgagcaaaatttggacatgctctgctcggaatctgatcgacctagacacagattagcagcagtagctttgtcatctgttccaagagttgcgatctgatagaagaaaaaaaaaccttcccttcaatgtaaaaccgaaactaacaagaaagaagcacagtgccgtttaggcaagtatggagtacgtattaagcatgtagaaggccatgcatgaaccactaacaagaaagaagcgcagtgccattcaggcaagcataagcatgtagattggcatgcatgaacaactaacagtagatcgtctctggtctgattagaagttttttgggaagccaagaaatcatgtacaactggttccatctcaaattccgtggcaaaaagaggcctaagcaacatacctcgagtagatcacattcaagcttggtcacccggtccgtcaatattctgattccgatgacttcgtaggttcctagctcaagccgctcgtgtccaagcgtcacttacgattagctaatgattacggcatctaggaccgactagtggcgcgccgactagctagctaaggtaccgagctcgaattcattccgattaatcgtggcctcttgctcttcaggatgaagagctatgtttaaacgtgcaagcgctactagacaattcagtacattaaaaacgtccgcaatgtgttattaagttgtctaagcgtcaatttgtttacaccacaatatatcctgcca

SEQ ID NO: 264 - DNA, 21819 bp, Artificial Sequence
  PHP99677
gtttacccgccaatatatcctgtcaaacactgatagtttaaactgaaggcgggaaacgacaatctgatcatgagcggagaattaagggagtcacgttatgacccccgccgatgacgcgggacaagccgttttacgtttggaactgacagaaccgcaacgttgaaggagccactcagcaagctggtacgattgtaatacgactcactatagggcgaattgagcgctgtttaaacgctcttcaactggaagagcggttacgctgtttaaacgctcttcaactggaagagcggttactaccggttcactagctagctgctaatcgagctagttaccctatgaggtgacatgaagcgctcacggttactatgacggttagcttcacgactgttggtggcagtagcgtacgacttagctatagttccggacttacccttaagcgatttaaatctgcggttaccgaattcgagctcggtacctagtacccttgtacttttggtttcacctgcatagagaaaacccacaagaatatgacagtctgatttgtcagtctcattctcaagcaacatttctctatccgttactttcatggtgaataacacaatccatcatcaatactttgtgttactcagaaactgaaagttattccgagtcttgcatatctttggacctactcgtttttctaccattattgctgattgttaagctctcgctacttgaatcggcattgttggagtgggaaggttcaaaaaattggagttatgactagttgtctctttctatgtacgatggagaaaatgaataaacaactgagaaaatggctcttgtttagttgatgatgctcttaagctttccactggttgccatatatgatttgggcatttcactttgatcttaatgggccttgtaaagcccaagactcatgattatctttagttgatgctcttaattaggtgtgggcaaataattcaaactgtatgtacccgaccaaaaccaaagcaaaaataatcgaaccaaaccgaaaatttaaaaataaccgaatgaaaactaaatcctataactgaaagaactgaaaccgaatcaaaatatttaatgtaaccaaaaatatccgaaatataattatattgtcaaaaatattaataatttctagattaaataattaaaaatacttaaaaatttatataaaatagtaaaaatactcgaaaataaccacaaatattcaaaaacaaccgaaatatcccaaaatattcaaagcaaaataaccgaatggataccaaattttaaaaccgaaaaaactggaacaaaaccaaaatcgaaccaaaatttcaaaaatcgaataaatactaaactttagaacaaaaaaaaacgataaccgaatgtatacgaaccaaagccgaattagataaccgaacgtccaggactactcttaatctttccgccacttatgatttgggctattactttgtttataatgagccttttcaagctcaagttcatgattgtccgtgagatgagaaactgacttgttggattcgaaaccctagctagtattggttaatacttaatacataaatgacctgcattgacatcatcatccaagaaaataaaaattgtatgcttgagatatttagttttcctagctaggttttctttattttagtaccgaatctttaggtgtgccacgttaatttagacccattttttcatacttaccaactgagtctagtttaatcatgactataatcgtataaaatgattcagtcgacgtcattgcgaacgtatataaaatcatccaaattgacgtcattccaaagaggtaagcatgcttatctaagagtccgagcatactaaacaagacgacattttatttgcactccaaatcaaattttgtattgcctaaagaaaaacaatcaaactcaagtttcttaaaattaatttcattcaaactaatcactttcaatatctcacatattattcatgccatttctatttgtctaaacatgatttaaaaaaaaaagtaaaatacaaagattactatgcaaaaactctataaaaaaaaattcaaatttcttatttatttgtgacatcaaattttcaaaataatttttttaattatcggttgatccggtcagtcgataaaaacataaactttcagcgaccgttaaaactttcctactaccgatttagagaaaatcttagcttgaaacgtaattgtaacctgccttcatgcaagtcgcaagatatgtcatcctaagttgtatatgttttctcaaaagatgtatttacttgagaaaatacgtttcaacgttgatggacaaccaattaagaatcaagcacctttcgtaatcaatttaggcttatcgtctaaggtatactgatttacgacagttgactagacttataaggaacaaaataatagaatagtttctaaacacttcacctaatcatagagactaagatggtaattcgtaaacgacaaagcctagtgacactgtccattgtaaaattccacatcatattagtattaaacatatacatgtagtttcctgaacacatgtagtatcaaacacacttcgtggcttcttcctcgaaacctgcggccgcgctatagttccggacttacccttaagataacttcgtatagcatacattatacgaagttatgggcccacgcgtgaagagcggttaccagagctggtcacctttgtccaccaagatggaactgtcttcggccagaatggccatctggattcagcaggcctagaaggccatttatcgctatcaactttgtatagaaaagttgggccgaattcgagctcggtacggccagaatggcccggaccgaagcttgcggccgcacactgatagtttaaactgaaggcgggaaacgacaatctgatcatgagcggagaattaagggagtcacgttatgacccccgccgatgacgcgggacaagccgttttacgtttggaactgacagaaccgcaacgttgaaggagccactcagccgcgggtttctggagtttaatgagctaagcacatacgtcagaaaccattattgcgcgttcaaaagtcgcctaaggtcactatcagctagcaaatatttcttgtcaaaaatgctccactgacgttccataaattcccctcggtatccaattagagtctcatattcactctcccgggggatctcgactctagaggatcgctcaggaaggccgctgagatagaggcatggcggccaatgcgggcggcggtggagcgggaggaggcagcggcagcggcagcgtggctgcgccggcggtgtgccgccccagcggctcgcggtggacgccgacgccggagcagatcaggatgctgaaggagctctactacggctgcggcatccggtcgcccagctcggagcagatccagcgcatcaccgccatgctgcggcagcacggcaagatcgagggcaagaacgtcttctactggttccagaaccacaaggcccgcgagcgccagaagcgccgcctcaccagcctcgacgtcaacgtgcccgccgccggcgcggccgacgccaccaccagccaactcggcgtcctctcgctgtcgtcgccgccgccttcaggcgcggcgcctccctcgcccaccctcggcttctacgccgccggcaatggcggcggatcggctgtgctgctggacacgagttccgactggggcagcagcggcgctgccatggccaccgagacatgcttcctgcaggactacatgggcgtgacggacacgggcagctcgtcgcagtggccacgcttctcgtcgtcggacacgataatggcggcggccgcggcgcgggcggcgacgacgcgggcgcccgagacgctccctctcttcccgacctgcggcgacgacggcggcagcggtagcagcagctacttgccgttctggggtgccgcgtccacaactgccggcgccacttcttccgttgcgatccagcagcaacaccagctgcaggagcagtacagcttttacagcaacagcaacagcacccagctggccggcaccggcaaccaagacgtatcggcaacagcagcagcagccgccgccctggagctgagcctcagctcatggtgctccccttaccctgctgcagggagtatgtgagagcaacgcgagctgccactgctcttcactgatgtctctggaatggaaggaggaggaagtgagcatagcgttggtgcgttgctgtcaagggcgaattcacatggttaacctagacttgtccatcttctggattggccaacttaattaatgtatgaaataaaaggatgcacacatagtgacatgctaatcactataatgtgggcatcaaagttgtgtgttatgtgtaattactagttatctgaataaaagagaaagagatcatccatatttcttatcctaaatgaatgtcacgtgtctttataattctttgatgaaccagatgcatttcattaaccaaatccatatacatataaatattaatcatatataattaatatcaattgggttagcaaaacaaatctagtctaggtgtgttttgcgaatgcggccgccaccgcggtggagctcgaattccggtccgggcctagaaggccagcttcaagtttgtacaaaaaagcaggctccggccagaatggcccggaccgggttaccgaattcgagctcggtaccatttaaattataatcagtacgaactatctgacaactatccggtacctatccgagtagtatctgttatccgtttcttacccgcccgggttattacccggtcccgtcttgtatccattccgaatcttaactacccgtatccggcctcgtatccgagacacatgcattagagtagaatacatgatgactcggtatccggctgtatctgtcccgttttcatccctagttatcctaccaaatttgagaaaatgactcatgatgcattatctcattttagatggagtgatttctcaaacaaacacccccttagatagtcaaagtgactattcaagtttcctcttccgggttactctattgttcgtcaaaatgactattcaaaccaaacactctctaaatgtaacaagtgactggataggctatagccgagggtgttcgtctagtagagggtttgtttggaattcgttttttttgtatttccgtgttttcctgcgaaattaaattggttcatataaaattcctacatggcttctaagaagctattatattttgaatcggtcttagctccaaaggagcaaaccctatttctccacctagcattacctcgtcctagctcttgaaatgctcaagtagtcaagtgtttacatgtagtgcagtcaatgtcaaggtaacgcaataaactaaggccatgttcattccacctaggattatataattcagcttatagattatataatcaccaaataacctatttatggattattatagatatctaaattatataatccacataataatgcgtgttgtttattttcctcttaacttatttaagttggattatataatcttgagggtaaataaacatggcctaaatttactacaacatggatagtagttagagacatttgtttttaaaccatgaaaaaaccctataaacttctaaaaagttctgctaaaattctaaatacaaattaatatacaacttcaaaaaaatgttcaaaggtcatatctccagcacttctaaaaatcatttatttagaaaaataaaaaacatagaaaaattacaaatcattctaattgatgccgtaatgtgtttcaaaaactttctacaacaaaagcttaaacacaaccatcaaaaatgtatgagacattaatgtatttcacgctattgactattgcatatatttgtcgtgtaaagttttatagcccatttatacatcaattataatgattttaatttttctagatttcttttgtacaattttctatttttctatagctaaataattttaacaaaatttctagtgatatttctattttttttatttttgtacacctagatttgtagaaagttagagacattgtttatagtttaaaaattgaaaaaatatttactgtatttttactaacgggtgaagtcgcatccaaaaccacttcagtccatggcaagaggtattttactaacggacggacatggcccagacatccggaagaggcccaagggcccataacgtccgtacccgcatccgacggttccaagcctaacacgcgtcatccatcgggagctcgctctagggttttgcttcgagaccgttcccacttcccatcgctcatataacaccgggcgccgccgcttccgtcctcttcctctcgctccgttgctcgcctcgggtcaaaccctaagcaggtacgcttccttgtgcgacggccatctcctcttgcggacggctcgatttctcaatctgttgtctatttcactgtatctgacctttctttgttttatttttgttgttgtttcttccacagggagttgatttatccgctgcagccggatccatggccactgtgaacaactggctcgctttctccctctccccgcaggagctgccgccctcccagacgacggactccacactcatctcggccgccaccgccgaccatgtctccggcgatgtctgcttcaacatcccccaagattggagcatgaggggatcagagctttcggcgctcgtcgcggagccgaagctggaggacttcctcggcggcatctccttctccgagcagcatcacaaggccaactgcaacatgatacccagcactagcagcacagtttgctacgcgagctcaggtgctagcaccggctaccatcaccagctgtaccaccagcccaccagctcagcgctccacttcgcggactccgtaatggtggcttcctcggccggtgtccacgacggcggtgccatgctcagcgcggccgccgctaacggtgtcgctggcgctgccagtgccaacggcggcggcatcgggctgtccatgattaagaactggctgcggagccaaccggcgcccatgcagccgagggtggcggcggctgagggcgcgcaggggctctctttgtccatgaacatggcggggacgacccaaggcgctgctggcatgccacttctcgctggagagcgcgcacgggcgcccgagagtgtatcgacgtcagcacagggtggagccgtcgtcgtcacggcgccgaaggaggatagcggtggcagcggtgttgccggcgctctagtagccgtgagcacggacacgggtggcagcggcggcgcgtcggctgacaacacggcaaggaagacggtggacacgttcgggcagcgcacgtcgatttaccgtggcgtgacaaggcatagatggactgggagatatgaggcacatctttgggataacagttgcagaagggaagggcaaactcgtaagggtcgtcaagtctatttaggtggctatgataaagaggagaaagctgctagggcttatgatcttgctgctctgaagtactggggtgccacaacaacaacaaattttccagtgagtaactacgaaaaggagctcgaggacatgaagcacatgacaaggcaggagtttgtagcgtctctgagaaggaagagcagtggtttctccagaggtgcatccatttacaggggagtgactaggcatcaccaacatggaagatggcaagcacggattggacgagttgcagggaacaaggatctttacttgggcaccttcagcacccaggaggaggcagcggaggcgtacgacatcgcggcgatcaagttccgcggcctcaacgccgtcaccaacttcgacatgagccgctacgacgtgaagagcatcctggacagcagcgccctccccatcggcagcgccgccaagcgcctcaaggaggccgaggccgcagcgtccgcgcagcaccaccacgccggcgtggtgagctacgacgtcggccgcatcgcctcgcagctcggcgacggcggagccctggcggcggcgtacggcgcgcactaccacggcgccgcctggccgaccatcgcgttccagccgggcgccgccagcacaggcctgtaccacccgtacgcgcagcagccaatgcgcggcggcgggtggtgcaagcaggagcaggaccacgcggtgatcgcggccgcgcacagcctgcaggacctccaccacctgaacctgggcgcggccggcgcgcacgactttttctcggcagggcagcaggccgccgccgctgcgatgcacggcctgggtagcatcgacagtgcgtcgctcgagcacagcaccggctccaactccgtcgtctacaacggcggggtcggcgacagcaacggcgccagcgccgtcggcggcagtggcggtggctacatgatgccgatgagcgctgccggagcaaccactacatcggcaatggtgagccacgagcaggtgcatgcacgggcctacgacgaagccaagcaggctgctcagatggggtacgagagctacctggtgaacgcggagaacaatggtggcggaaggatgtctgcatgggggactgtcgtgtctgcagccgcggcggcagcagcaagcagcaacgacaacatggccgccgacgtcgggcatggcggcgcgcagctcttcagtgtctggaacgacacttaagcgtacgtgccggcctggctctccgaaagggcgtattccagcacactggcggccgttactagacccaacctagacttgtccatcttctggattggccaacttaattaatgtatgaaataaaaggatgcacacatagtgacatgctaatcactataatgtgggcatcaaagttgtgtgttatgtgtaattactagttatctgaataaaagagaaagagatcatccatatttcttatcctaaatgaatgtcacgtgtctttataattctttgatgaaccagatgcatttcattaaccaaatccatatacatataaatattaatcatatataattaatatcaattgggttagcaaaacaaatctagtctaggtgtgttttgcgaatgcggcctccgggcacccagctttcttgtacaaagtggccgttaacggatcggccagaatggcccggaccgggttaccccgcggttcaaagccaatgactgttgttaggtccagtttctaaggacgaatcatccaatcactggttctttctgaacaaaacaaagagctatagagttacgttactgtagccgagacagagcctgcaatctggttatgccacatactaggttctttcttaaagttgactcactctatcctaagttctacttacaaggagctacaacaaattggtcataaccggagagcgttcaaggaggtaatatcccatcttactctgtagcaaggctacaaaaggagagctaaagaactaggctacaaaaagagagctaaagaactaactatctagcaagactacagagctatagtgtagagatttcataaccggtgagcgttcaaggatactttgaagagaagaggtaatatctcaactagcaagactacaaaaaaatggagatataaaactaactgtctaacaagactacagagctatagtagagatagatacgttcgacacttaagcatgagaattcgagctcggtaccctggttcacaaactcaatacaacacacagtggagtagggtattacgctccggcggcccgaaccactctaaatccttgtgtcctcgtgtgctcttccaccattaatgactgtaattgcagggacacgaagagttgtagcgcttttgccaacaagatccgctatatgctagtagagtggaacctgcacagcaacaagcatccaataatctgagaataagaattatgtgtggtgatggttctcatctctgcaactcgccattttcgcgagagaaccaaatccaagttggtgaagatcatgatttgggctcatgggctggcatagtagctattacctttgcaattgtggttcgaatctatccgatattctccttttcagggagagctaatgcttatgcttattgggtattttggtttgacactgcttcacgcccaaaaaaaggcaactatgtctgagttggatatggcccaaaaaaaggcagctatgtctgagttggatatggaagtcttctttcgtttagggtgaagtaagaccaagctcatgagcttattatcttaggtcggaacaaattagttgataggcatggcacatttatcaaattataatgattttaacagaaaagcaacacctctttttcagcagcaccagctttgcaagctgcaattgacactccaagcatagtatttgctccaaactcagcctgcatttcgcacaatatcatatctatttccatttggataaaatatattttccagaaatatgggaacagaatcaagatacagaaaaaagttgtggtagtagtggtaagtggaaacacaagtacagtgaaaagatagcattatttctgaacagtcaaattaaccgaaataagtagtatcacatactgcccctaaattgactacacccaatgtaaagaattgcttgagcatattgagccatcagttgtttgtttgtgtaacggatttgacaatgcagagttcaggagcaaaaaaccgcaaaggagagaaagagggaaaggatctcctagtatcccaccttgtggcgcgccctgtcaagtgcatgatggcctggtcgatctgcgtctgctgctgcggttccatcccaacgagtgcctccgacaccttgtcgttgatcacccgcaccgcgtaggcgacccccctggcgaggaacttccgcctctcggaggccccggccgcgtcggcggcggcgccctcgagcgcgcccacgctagccgtagatgctcggtgcacggccttgttggtgtgcaactcgacctcaacggccggtgcgctacgcccgtcaaggatctggcgcgcccgcaccctcgtgatcacggtgggcgcctcccgcctcatgtggccgacgatgaaaagcgccgggttaggggccttggcgcgcaccgccgtattcagggcctcctcgctcttgcgcgagagcaggtgcttccccaggtactcctgcactgacaaggctgccacagcggtggaatttgtcctcacgacttcgccacgtcgtcctcacctccctggcttcccacgactccgccgtatcgaggtgctcggtgggtcgtcttaatccgaagtccgaactaggaagacgagacagagaggtctgaggaatgggcctcgtttgatgttgagctgaattatttttccagcataagcccaggtcttggtccatgaacaaaattactagaaacccagcccagtactacgatctaaaagagggactgccactggatagctctctctagcattctccacgctccaatacagcggcgtcgtgtctatccgggtctatccgcgaacacgtgagaactctccagaaactgctttctcctccacttcatctctctcgctttccctctataaaaagaccccttctaggaattgagggagacagcaagcaccaagcagcgatccgaagctcaatcaattcactcaaacctcttccccaaatcttcgattagatcttcgttgacaagaagactagaaccgaacctgacatgtccaacctgctcacggttcaccagaaccttccggctcttccagtggacgcgacgtccgatgaagtcaggaagaacctcatggacatgttccgcgacaggcaagcgttcagcgagcacacctggaagatgctgctctccgtctgccgctcctgggctgcatggtgcaagctgaacaacaggaagtggttccccgctgagcccgaggacgtgagggattaccttctgtacctgcaagcgcgaggtttgtttctgcttctacctttgatatatatataataattatcattaattagtagtaatataatatttcaaatatttttttcaaaataaaagaatgtagtatatagcaattgcttttctgtagtttataagtgtgtatattttaatttataacttttctaatatatgaccaaaacatggtgatgcctaggtctggcagtgaagaccatccagcaacaccttggacaactgaacatgcttcacaggcgctccggcctcccgcgccccagcgactcgaacgccgtgagcctcgtcatgcgccgcatcaggaaggaaaacgtcgatgccggcgaaagggcaaagcaggccctcgcgttcgagaggaccgatttcgaccaggtccgcagcctgatggagaacagcgacaggtgccaggacattaggaacctggcgttcctcggaattgcatacaacacgctcctcaggatcgcggaaattgcccgcattcgcgtgaaggacattagccgcaccgacggcggcaggatgcttatccacattggcaggaccaagacgctcgtttccaccgcaggcgtcgaaaaggccctcagcctcggagtgaccaagctcgtcgaacgctggatctccgtgtccggcgtcgcggacgacccaaacaactacctcttctgccgcgtccgcaagaacggggtggctgcccctagcgccaccagccaactcagcacgagggccttggaaggtattttcgaggccacccaccgcctgatctacggcgcgaaggatgacagcggtcaacgctacctcgcatggtccgggcactccgcccgcgttggagctgctagggacatggcccgcgccggtgtttccatccccgaaatcatgcaggcgggtggatggacgaacgtgaacattgtcatgaactacattcgcaaccttgacagcgagacgggcgcaatggttcgcctcctggaagatggtgactgaggtacccaacctagacttgtccatcttctggattggccaacttaattaatgtatgaaataaaaggatgcacacatagtgacatgctaatcactataatgtgggcatcaaagttgtgtgttatgtgtaattactagttatctgaataaaagagaaagagatcatccatatttcttatcctaaatgaatgtcacgtgtctttataattctttgatgaaccagatgcatttcattaaccaaatccatatacatataaatattaatcatatataattaatatcaattgggttagcaaaacaaatctagtctaggtgtgttttgcgatccgatatcgaattggccacggtaccagctgctgctgttctagggttcacaagtctgcctatttgtcttccccaatggagctatggttgtctggtctggtccttggtcgtgtcccgtttcattgtgtactatttacctgtaatgtgtatccttaagtctggtttgatggtgtctgaaacgttttgctgtggtagagcagcatggaagaactataatgaataagtgatccctaatcattgtgtccaaattttgcttctgctatacccttttgtgctgtttcttatgttttgcttaaaaatttgatctgacaaacaaatttgtctaaattatgctcttgttctgactgtgtactgtacacatttgtattgctaccggtttggcacatagttttctctttgattgcagatcaaacccttctgattgcagattgcttggctatggctgatgtgctcactgttcttctttagcttgtatattgctgatggtggcttggctacggctgaaaaagttgctgctgcgccgacttggcaactgttgctccagtaatgctttgtcctctcttcctagccgccgacttggcacttggcagctgttgctcctgtaatgcgttgttatctcttatctcttgagatgtactatgattttgaggctgtttgacttgtgccagattgccagtgctgatgctatattatctcaggtttttatgctagtatatgttttactgtgtgctgcctgtgtcgagttacgtaatctattgaaccgctatgcgtgttgatgccctgttgttgcttgccagattgatgcccctgttgcttgcagcttgcaagctgtagtgaaatcctaaaattccaaaccaaatctattctgaacttttgaagatctgtgatgtccggaagaaaagattcaaacagataaacgggactctccagaatctataaaataaatgatcgacaaacgctttgctttggtaggcttcaagcttggtcacccggtccgggcctagaaggccagcttcggccgccccgggcaactttattatacaaagttgatagataaatcagatatctggttcctaaggacccggcggaccgattaaactgattcggtccgacgcgttacctaataacttcgtatagcatacattatacgaagttattagctaactaactagtaagcttaagccatgggtcgacggatccgttaactagcgtggcatttggcaccgccgcacactatgcgagctaggagtgctagtttacagatgaaactatgaaaccaagaaaacacaattgtccgtagctagcgcgtggcgtcgtgtcaagcttcacacagtatcttcgttcttcactataaatcgcgcctgttgttcgtgagacccaccaccgtggataacagtcccctaataataagcgatcaacagcactgctgatggctgaacaccgaggcgccgccgcgcgtaaccatccgccggagcagcccgtcgtgccggcgaacgacgccttccccgaccgcgcccagcagctctgcctcgacgccgggcgcgcgctcgcgatgtgcggcgtgctcgtcgccgtccctcccgcattttacgcgtcgacgtcgcggacgacaccgcacttgccttcgtcggcttcgtcctctggatcatcggtgcgtggctgtgcctcctggcgctcacgcccttggctccacgggcggtgagggcgggcggggccgccgccagcaccttgctgatcaggtgcctgtccctttcatgaactactagcgcccgcgcccgcggccgccgggcacaagagaacacatcgatgttcgctgcgtacgtcagcaataaggcactctttgtcagtagtcgagtgcatatgttgggtgtttgccctgggagatttcaagtgttgtggccattatcccgcaggataaaaaatcggcggcttttggattgatacggaaaataacgatgtttcatgctcgtgttgtgtgtgtgacatcttgtcagccaagtttttaaccgttgctactccccctctgtgggctcagtgtgtggaccggaatacgtcgtacataggccgtagcctaagcccaatatgccgtttttcaggttggcctgtgtgacgacaagcgggtctcaaaagcccatcacgcaactggcctgcaattattggaggagagcgcgtcgagttggttccagaggctgcgtggtggggccggactctgcgacgacctctcgttcgcgtccgatttggttgccgtgagccgtgacgtaacgcctccttccgttcctccctatataagttccacccccgggtccggtttccccaagccccagtgacccccgatcccgatcgcgaaatctccgcacccgccggcaagggaccgaagcaagcctctctcccgaccgtcgcatcaaggtacgcgtccgctcgatctgtcctcttccttctcgatttgacttgctgtggtgcccgatcacgggatcagaatcgcaccagtgtagatttcgcatgttctaagatgtgttagtttccaggctaatccagttctcttgacgcccgatccgatcgagctccgtgtttatttcagcctaatcgtagtattcccctaaaatttcctcattagggggttcgcaagattgttggtcgacaggttcacttatgctcgatcgcttacttttagtcgattcatgctgcgtactattgttgccccccgtggttttatcttttctcgtgtgaaatccagtagatatagtagatatcgtagcattaggttttaattcaatcgattgattattgtatcatcaaaattgagaagttcgaatcatgcctatcatgctgcctcaaccgaaatcctgtatattgaagtttcaattcaattgattgatcattcattagattcaaccaaaatctagaaggttagatgacgcatgtcatgctgcctgcgtagtttacctttgatctgtttatgattaccttatcagtaggatatttgtgattttgggaagtagcactaactgattcatgctgacatgatgttccctttcagattatactgttgagtcctatctaattgatgctttgtatgctatatgaatacgtcatggtaaattagcagttaattagcatattagcaattgggcgtacctcatcaggattgctcttgtagatgtgtgtggtgatgtttcttgttcaattcatgttctgctttaaaagtatgtgttctctgtttgttaattaagattcatggttataatgatttggacctaattaatcagggttgcccttttagatgcgtggttacttgttgagttcatttttttcctgctatagttgtatgcgtttgttcattcatggttagatttgatttgtttcttctctattccatgccttccatatacttcaattgtagcttaacatgagatttctgtatatgcaggtcgaccgccggggatccacacgacaccatggcccagtccaagcacggcctgaccaaggagatgaccatgaagtaccgcatggagggctgcgtggacggccacaagttcgtgatcaccggcgagggcatcggctaccccttcaagggcaagcaggccatcaacctgtgcgtggtggagggcggccccttgcccttcgccgaggacatcttgtccgccgccttcatgtacggcaaccgcgtgttcaccgagtacccccaggacatcgtcgactacttcaagaactcctgccccgccggctacacctgggaccgctccttcctgttcgaggacggcgccgtgtgcatctgcaacgccgacatcaccgtgagcgtggaggagaactgcatgtaccacgagtccaagttctacggcgtgaacttccccgccgacggccccgtgatgaagaagatgaccgacaactgggagccctcctgcgagaagatcatccccgtgcccaagcagggcatcttgaagggcgacgtgagcatgtacctgctgctgaaggacggtggccgcttgcgctgccagttcgacaccgtgtacaaggccaagtccgtgccccgcaagatgcccgactggcacttcatccagcacaagctgacccgcgaggaccgcagcgacgccaagaaccagaagtggcacctgaccgagcacgccatcgcctccggctccgccttgccctccggactcagatctcgatagagtcaacctagacttgtccatcttctggattggccaacttaattaatgtatgaaataaaaggatgcacacatagtgacatgctaatcactataatgtgggcatcaaagttgtgtgttatgtgtaattactagttatctgaataaaagagaaagagatcatccatatttcttatcctaaatgaatgtcacgtgtctttataattctttgatgaaccagatgcatttcattaaccaaatccatatacatataaatattaatcatatataattaatatcaattgggttagcaaaacaaatctagtctaggtgtgttttgcgaattgcggcgcccttactttaacgcctctaaccaacacccctttatctttataaggaacaataaacagaatttgccccactgttctaaatcacctaataatatccccagctaaaaacaataaaggtttcctagaattaagacaagcatgactgttcctccaggagggtttggaacattgttgcagtcttgcagatacgggcgaagggtgagaaacagagcggagggctggaggtgacctcggtagtcgacgccggagttgagcttgacaacgacggggcggcccctgatggacttgaggaagtccgatggcgtcttcaccgtcccgccggcgcccgaggcgggcctgtcgctgccgccgccgccgctgctcatcttgcgcgctgtgcccccggcggtgtccctgtgttgcggatcgcgggtgggccaggtggatgcgagggcgacccgtttggactccggccggagccgccggatccctggtcggtgtcagtgccgtttactctgggccccacgtgtcagtaccgtctgtagatgacaacaacccgtcgtccacagtcatgtccaaaatatcctttcttcttttttttcgattcggatatctatcttccttttttttttccaaaaatcttcttgacgcaccagcgcgcacgtttgtggtaaacgccgacacgtcggtcccacgtcgatagaccccacccaccagtgagtagcgtgtacgtattcgggggtgacggacgtgtcgccgtcgtcttgctagtcccattcccatctgagccacacatctctgaacaaaaaaaaggagggaggcctccacgcacatccccctccgtgccacccgccccaaaccctcgcgccgcctccgagacagccgccgcaaccatggccaccgccgccgccgcgtctaccgcgctcactggcgccactaccgctgcgcccaaggcgaggcgccgggcgcacctcctggccacccgccgcgccctcgccgcgcccatcaggtgctcagcggcgtcacccgccatgccgatggctcccccggccaccccgctccggccgtggggccccaccgagccccgcaagggtgctgacatcctcgtcgagtccctcgagcgctgcggcgtccgcgacgtcttcgcctaccccggcggcgcgtccatggagatccaccaggcactcacccgctcccccgtcatcgccaaccacctcttccgccacgagcaaggggaggcctttgccgcctccggctacgcgcgctcctcgggccgcgtcggcgtctgcatcgccacctccggccccggcgccaccaacctagtctccgcgctcgccgacgcgctgctcgattccgtccccatggtcgccatcacgggacaggtggcgcgacgcatgattggcaccgacgccttccaggagacgcccatcgtcgaggtcacccgctccatcaccaagcacaactacctggtcctcgacgtcgacgacatcccccgcgtcgtgcaggaggctttcttcctcgcctcctctggtcgaccagggccggtgcttgtcgacatccccaaggacatccagcagcagatggcggtgcctgtctgggacaagcccatgagtctgcctgggtacattgcgcgccttcccaagccccctgcgactgagttgcttgagcaggtgctgcgtcttgttggtgaatcgcggcgccctgttctttatgtgggcggtggctgcgcagcatctggtgaggagttgcgacgctttgtggagctgactggaatcccggtcacaactactcttatgggcctcggcaacttccccagcgacgacccactgtctctgcgcatgctaggtatgcatgggacggtgtatgcaaattatgcagtggataaggccgatctgttgcttgcacttggtgtgcggtttgatgatcgcgtgacagggaagattgaggcttttgcaagcagggctaagattgtgcacgttgatattgatccggctgagattggcaagaacaagcagccacatgtgtccatctgtgcagatgttaagcttgctttgcagggcatgaatgctcttcttgaaggaagcacatcaaagaagagctttgactttggctcatggaacgatgagttggatcagcagaagagggaattcccccttgggtataaaacatctaatgaggagatccagccacaatatgctattcaggttcttgatgagctgacgaaaggcgaggccatcatcggcacaggtgttgggcagcaccagatgtgggcggcacagtactacacttacaagcggccaaggcagtggttgtcttcagctggtcttggggctatgggatttggtttgccggctgctgctggtgcttctgtggcaaacccaggtgtcactgttgttgacatcgatggagatggtagctttctcatgaacgttcaggagctagctatgatccgaattgagaacctcccagtgaaggtctttgtgctaaacaaccagcacctggggatggtggtgcagttggaggacaggttctataaggccaacagagcgcacacatacttgggaaacccagagaatgaaagtgagatatatccagatttcgtgacgatcgccaaagggttcaacattccagcggtccgtgtgacaaagaagaacgaagtccgcgcagcgataaagaagatgctcgagactccagggccgtacctcttggatataatcgtcccacaccaggagcatgtgttgcctatgatccctagtggtggggctttcaaggatatgatcctggatggtgatggcaggactgtgtactgactagctagtcagttaacagatctgccagatcctcggtgtacaaataacccgtcttatcctatgagacgggccggcgtcagtgtgttctggaggaatttttatgtcagagcctttttctttgtgtgcttgatgtagatgccaagggaagcttattggctgttgaagcttgatgcaaaataaattatggaactctgttttttgtttatctaataataactagcaaatatgcttccattgcattgaaactaacagccttttgtgtttccaagttttattttgtgacaatgtcatctatttcaattagttgtggaatcggaaacttgcaggactaacttggaaactccaatccctcagcatcctggactttttcctggtgtaatccatgtagatattattttaatcatcattttagttctggaggtttttccatctccggttttgctcccctttcttcaaaaaaaaaaaaaaaatgccgtaggcgccgcaacgcccacctgttgttcaaactcatgggcacgagtggctcgaagattttatacaacaattgctgtagtttcaccgttgctggtgaagaagcatttttttaaaaaaatatagtggtattcattttaattagtttagttgtgcagcgagcaaaatttggacatgctctgctcggaatctgatcgacctagacacagattagcagcagtagctttgtcatctgttccaagagttgcgatctgatagaagaaaaaaaaaccttcccttcaatgtaaaaccgaaactaacaagaaagaagcacagtgccgtttaggcaagtatggagtacgtattaagcatgtagaaggccatgcatgaaccactaacaagaaagaagcgcagtgccattcaggcaagcataagcatgtagattggcatgcatgaacaactaacagtagatcgtctctggtctgattagaagttttttgggaagccaagaaatcatgtacaactggttccatctcaaattccgtggcaaaaagaggcctaagcaacatacctcgagtagatcacattcaagcttggtcacccggtccgtcaatattctgattccgatgacttcgtaggttcctagctcaagccgctcgtgtccaagcgtcacttacgattagctaatgattacggcatctaggaccgactagtggcgcgccgactagctagctaaggtaccgagctcgaattcattccgattaatcgtggcctcttgctcttcaggatgaagagctatgtttaaacgtgcaagcgctactagacaattcagtacattaaaaacgtccgcaatgtgttattaagttgtctaagcgtcaatttgtttacaccacaatatatcctgcca

SEQ ID NO: 265 - DNA, 21728 bp, Artificial Sequence
  PHP99678
gtttacccgccaatatatcctgtcaaacactgatagtttaaactgaaggcgggaaacgacaatctgatcatgagcggagaattaagggagtcacgttatgacccccgccgatgacgcgggacaagccgttttacgtttggaactgacagaaccgcaacgttgaaggagccactcagcaagctggtacgattgtaatacgactcactatagggcgaattgagcgctgtttaaacgctcttcaactggaagagcggttacgctgtttaaacgctcttcaactggaagagcggttactaccggttcactagctagctgctaatcgagctagttaccctatgaggtgacatgaagcgctcacggttactatgacggttagcttcacgactgttggtggcagtagcgtacgacttagctatagttccggacttacccttaagcgatttaaatctgcggttaccgaattcgagctcggtacctagtacccttgtacttttggtttcacctgcatagagaaaacccacaagaatatgacagtctgatttgtcagtctcattctcaagcaacatttctctatccgttactttcatggtgaataacacaatccatcatcaatactttgtgttactcagaaactgaaagttattccgagtcttgcatatctttggacctactcgtttttctaccattattgctgattgttaagctctcgctacttgaatcggcattgttggagtgggaaggttcaaaaaattggagttatgactagttgtctctttctatgtacgatggagaaaatgaataaacaactgagaaaatggctcttgtttagttgatgatgctcttaagctttccactggttgccatatatgatttgggcatttcactttgatcttaatgggccttgtaaagcccaagactcatgattatctttagttgatgctcttaattaggtgtgggcaaataattcaaactgtatgtacccgaccaaaaccaaagcaaaaataatcgaaccaaaccgaaaatttaaaaataaccgaatgaaaactaaatcctataactgaaagaactgaaaccgaatcaaaatatttaatgtaaccaaaaatatccgaaatataattatattgtcaaaaatattaataatttctagattaaataattaaaaatacttaaaaatttatataaaatagtaaaaatactcgaaaataaccacaaatattcaaaaacaaccgaaatatcccaaaatattcaaagcaaaataaccgaatggataccaaattttaaaaccgaaaaaactggaacaaaaccaaaatcgaaccaaaatttcaaaaatcgaataaatactaaactttagaacaaaaaaaaacgataaccgaatgtatacgaaccaaagccgaattagataaccgaacgtccaggactactcttaatctttccgccacttatgatttgggctattactttgtttataatgagccttttcaagctcaagttcatgattgtccgtgagatgagaaactgacttgttggattcgaaaccctagctagtattggttaatacttaatacataaatgacctgcattgacatcatcatccaagaaaataaaaattgtatgcttgagatatttagttttcctagctaggttttctttattttagtaccgaatctttaggtgtgccacgttaatttagacccattttttcatacttaccaactgagtctagtttaatcatgactataatcgtataaaatgattcagtcgacgtcattgcgaacgtatataaaatcatccaaattgacgtcattccaaagaggtaagcatgcttatctaagagtccgagcatactaaacaagacgacattttatttgcactccaaatcaaattttgtattgcctaaagaaaaacaatcaaactcaagtttcttaaaattaatttcattcaaactaatcactttcaatatctcacatattattcatgccatttctatttgtctaaacatgatttaaaaaaaaaagtaaaatacaaagattactatgcaaaaactctataaaaaaaaattcaaatttcttatttatttgtgacatcaaattttcaaaataatttttttaattatcggttgatccggtcagtcgataaaaacataaactttcagcgaccgttaaaactttcctactaccgatttagagaaaatcttagcttgaaacgtaattgtaacctgccttcatgcaagtcgcaagatatgtcatcctaagttgtatatgttttctcaaaagatgtatttacttgagaaaatacgtttcaacgttgatggacaaccaattaagaatcaagcacctttcgtaatcaatttaggcttatcgtctaaggtatactgatttacgacagttgactagacttataaggaacaaaataatagaatagtttctaaacacttcacctaatcatagagactaagatggtaattcgtaaacgacaaagcctagtgacactgtccattgtaaaattccacatcatattagtattaaacatatacatgtagtttcctgaacacatgtagtatcaaacacacttcgtggcttcttcctcgaaacctgcggccgcgctatagttccggacttacccttaagataacttcgtatagcatacattatacgaagttatgggcccacgcgtgaagagcggttaccagagctggtcacctttgtccaccaagatggaactgtcttcggccagaatggccatctggattcagcaggcctagaaggccatttatcgctatcaactttgtatagaaaagttgggccgaattcgagctcggtacggccagaatggcccggaccgaagcttgcggccgcacactgatagtttaaactgaaggcgggaaacgacaatctgatcatgagcggagaattaagggagtcacgttatgacccccgccgatgacgcgggacaagccgttttacgtttggaactgacagaaccgcaacgttgaaggagccactcagccgcgggtttctggagtttaatgagctaagcacatacgtcagaaaccattattgcgcgttcaaaagtcgcctaaggtcactatcagctagcaaatatttcttgtcaaaaatgctccactgacgttccataaattcccctcggtatccaattagagtctcatattcactctcccgggggatctcgactctagaggatcgctcaggaaggccgctgagatagaggcatggcggccaatgcgggcggcggtggagcgggaggaggcagcggcagcggcagcgtggctgcgccggcggtgtgccgccccagcggctcgcggtggacgccgacgccggagcagatcaggatgctgaaggagctctactacggctgcggcatccggtcgcccagctcggagcagatccagcgcatcaccgccatgctgcggcagcacggcaagatcgagggcaagaacgtcttctactggttccagaaccacaaggcccgcgagcgccagaagcgccgcctcaccagcctcgacgtcaacgtgcccgccgccggcgcggccgacgccaccaccagccaactcggcgtcctctcgctgtcgtcgccgccgccttcaggcgcggcgcctccctcgcccaccctcggcttctacgccgccggcaatggcggcggatcggctgtgctgctggacacgagttccgactggggcagcagcggcgctgccatggccaccgagacatgcttcctgcaggactacatgggcgtgacggacacgggcagctcgtcgcagtggccacgcttctcgtcgtcggacacgataatggcggcggccgcggcgcgggcggcgacgacgcgggcgcccgagacgctccctctcttcccgacctgcggcgacgacggcggcagcggtagcagcagctacttgccgttctggggtgccgcgtccacaactgccggcgccacttcttccgttgcgatccagcagcaacaccagctgcaggagcagtacagcttttacagcaacagcaacagcacccagctggccggcaccggcaaccaagacgtatcggcaacagcagcagcagccgccgccctggagctgagcctcagctcatggtgctccccttaccctgctgcagggagtatgtgagagcaacgcgagctgccactgctcttcactgatgtctctggaatggaaggaggaggaagtgagcatagcgttggtgcgttgctgtcaagggcgaattcacatggttaacctagacttgtccatcttctggattggccaacttaattaatgtatgaaataaaaggatgcacacatagtgacatgctaatcactataatgtgggcatcaaagttgtgtgttatgtgtaattactagttatctgaataaaagagaaagagatcatccatatttcttatcctaaatgaatgtcacgtgtctttataattctttgatgaaccagatgcatttcattaaccaaatccatatacatataaatattaatcatatataattaatatcaattgggttagcaaaacaaatctagtctaggtgtgttttgcgaatgcggccgccaccgcggtggagctcgaattccggtccgggcctagaaggccagcttcaagtttgtacaaaaaagcaggctccggccagaatggcccggaccgggttaccgaattcgagctcggtaccatttaaataatcacaaataatattcacaaaaatatatctctaaatagacttgctaccaaaatatatttcgtcacgaatgttagtagattttattttttccgaagtagcagaattcatcagtttgcatataaatgcatcaaggtttgagcactgacgagcattgtattgtgccccctggatctactaacaccaagacgcactaccgcagcagcgcaggagcagacgagggagccagcccagcaggcatgggcgtgcttcggagcacgcaaagccttgaggcggaggtggacgagctgcgcgccgcgctcctggcgggcgggtggcaccgctcggctggccacgcggacgccaagcgcgctccccagggcgatgccagaggggccgcagcgcgcgccgtgtgcgtcactcgcggcatctccttcgtcgggttcgccgtcgtcgaccgcctcctccggcacgggtacaccgtccgcctcgcgttggagacgcaaggtaccaacgtcccgtccgtcctcccccacactaacctacccggctacttctctcgctcgctctgaagctctcgcgcccctcggcccggcctgggacaattggtttgggacaagggtatccggccgcgcggacagaggcaataagtaccaacggaatgtacctgtaggtgcgccagtgctggactcgagagagacagagctgcatccaacgtcggtgcctcccgcggtgcctcgcgccaggctaccagtacttccgcgcccaacaccacgccccaagctggttgatgcacgcccaacgccggtagttctatgcccccgtgatacaccgccgccgcgtccaacgccatgccccaagccgtcacccacgtcaaggctgcagacgtctccttcctcctccatgccgacatggtctacgctcaaatcgaagatgagctcaagccgcaacaacaaatttcggtgctcccaagcttcataaaggctatcttcggcgtcgttgcgatccatggtggcacagaatcgagttgatgttgtagctggcggctagggtttgaagtggagaagaggtccggctggtggcatcctatcgtctattgagggttgggtccggtggcatcatacttgatgacaattgaaagtaattttaatcaacttgtcatgagtagtgagtcttttataaaaaataagctgaaataagcaccctttgatgagcttataggattatcataatctcaaatgctaaattatataattttattagataagttgcttgtttgtttccccactagcttatttacattggattatataatctacataaattataatctcaaacaaaaagtccttaatcagagatcagcgaggtctcacgagtgagaaggcgagagcttgtccaaacgagcattttcgggcgtgtgaacacccatttcagcaaagccgtcgttgtccagttcagcgaagcgcattctgcggctttggcgtgacccattctgctagctcagcactgagaatacgcgtccgctgcagcgttggcgtacaggccggactacattagccaacgcgtatcggcagtggcaaaccctcttcgcttctaactccgctgggccaccagctttgaccgccgcctcccttcccctccgctactgctcctccccaccccactcccccgcaggagcggcggcggcggcggcgaggtcgtaccccacatcggcgagcggcggcggcaccgccggaggcaaaggcaagggatccatggccactgtgaacaactggctcgctttctccctctccccgcaggagctgccgccctcccagacgacggactccacactcatctcggccgccaccgccgaccatgtctccggcgatgtctgcttcaacatcccccaagattggagcatgaggggatcagagctttcggcgctcgtcgcggagccgaagctggaggacttcctcggcggcatctccttctccgagcagcatcacaaggccaactgcaacatgatacccagcactagcagcacagtttgctacgcgagctcaggtgctagcaccggctaccatcaccagctgtaccaccagcccaccagctcagcgctccacttcgcggactccgtaatggtggcttcctcggccggtgtccacgacggcggtgccatgctcagcgcggccgccgctaacggtgtcgctggcgctgccagtgccaacggcggcggcatcgggctgtccatgattaagaactggctgcggagccaaccggcgcccatgcagccgagggtggcggcggctgagggcgcgcaggggctctctttgtccatgaacatggcggggacgacccaaggcgctgctggcatgccacttctcgctggagagcgcgcacgggcgcccgagagtgtatcgacgtcagcacagggtggagccgtcgtcgtcacggcgccgaaggaggatagcggtggcagcggtgttgccggcgctctagtagccgtgagcacggacacgggtggcagcggcggcgcgtcggctgacaacacggcaaggaagacggtggacacgttcgggcagcgcacgtcgatttaccgtggcgtgacaaggcatagatggactgggagatatgaggcacatctttgggataacagttgcagaagggaagggcaaactcgtaagggtcgtcaagtctatttaggtggctatgataaagaggagaaagctgctagggcttatgatcttgctgctctgaagtactggggtgccacaacaacaacaaattttccagtgagtaactacgaaaaggagctcgaggacatgaagcacatgacaaggcaggagtttgtagcgtctctgagaaggaagagcagtggtttctccagaggtgcatccatttacaggggagtgactaggcatcaccaacatggaagatggcaagcacggattggacgagttgcagggaacaaggatctttacttgggcaccttcagcacccaggaggaggcagcggaggcgtacgacatcgcggcgatcaagttccgcggcctcaacgccgtcaccaacttcgacatgagccgctacgacgtgaagagcatcctggacagcagcgccctccccatcggcagcgccgccaagcgcctcaaggaggccgaggccgcagcgtccgcgcagcaccaccacgccggcgtggtgagctacgacgtcggccgcatcgcctcgcagctcggcgacggcggagccctggcggcggcgtacggcgcgcactaccacggcgccgcctggccgaccatcgcgttccagccgggcgccgccagcacaggcctgtaccacccgtacgcgcagcagccaatgcgcggcggcgggtggtgcaagcaggagcaggaccacgcggtgatcgcggccgcgcacagcctgcaggacctccaccacctgaacctgggcgcggccggcgcgcacgactttttctcggcagggcagcaggccgccgccgctgcgatgcacggcctgggtagcatcgacagtgcgtcgctcgagcacagcaccggctccaactccgtcgtctacaacggcggggtcggcgacagcaacggcgccagcgccgtcggcggcagtggcggtggctacatgatgccgatgagcgctgccggagcaaccactacatcggcaatggtgagccacgagcaggtgcatgcacgggcctacgacgaagccaagcaggctgctcagatggggtacgagagctacctggtgaacgcggagaacaatggtggcggaaggatgtctgcatgggggactgtcgtgtctgcagccgcggcggcagcagcaagcagcaacgacaacatggccgccgacgtcgggcatggcggcgcgcagctcttcagtgtctggaacgacacttaagcgtacgtgccggcctggctctccgaaagggcgtattccagcacactggcggccgttactagacccaacctagacttgtccatcttctggattggccaacttaattaatgtatgaaataaaaggatgcacacatagtgacatgctaatcactataatgtgggcatcaaagttgtgtgttatgtgtaattactagttatctgaataaaagagaaagagatcatccatatttcttatcctaaatgaatgtcacgtgtctttataattctttgatgaaccagatgcatttcattaaccaaatccatatacatataaatattaatcatatataattaatatcaattgggttagcaaaacaaatctagtctaggtgtgttttgcgaatgcggcctccgggcacccagctttcttgtacaaagtggccgttaacggatcggccagaatggcccggaccgggttaccccgcggttcaaagccaatgactgttgttaggtccagtttctaaggacgaatcatccaatcactggttctttctgaacaaaacaaagagctatagagttacgttactgtagccgagacagagcctgcaatctggttatgccacatactaggttctttcttaaagttgactcactctatcctaagttctacttacaaggagctacaacaaattggtcataaccggagagcgttcaaggaggtaatatcccatcttactctgtagcaaggctacaaaaggagagctaaagaactaggctacaaaaagagagctaaagaactaactatctagcaagactacagagctatagtgtagagatttcataaccggtgagcgttcaaggatactttgaagagaagaggtaatatctcaactagcaagactacaaaaaaatggagatataaaactaactgtctaacaagactacagagctatagtagagatagatacgttcgacacttaagcatgagaattcgagctcggtaccctggttcacaaactcaatacaacacacagtggagtagggtattacgctccggcggcccgaaccactctaaatccttgtgtcctcgtgtgctcttccaccattaatgactgtaattgcagggacacgaagagttgtagcgcttttgccaacaagatccgctatatgctagtagagtggaacctgcacagcaacaagcatccaataatctgagaataagaattatgtgtggtgatggttctcatctctgcaactcgccattttcgcgagagaaccaaatccaagttggtgaagatcatgatttgggctcatgggctggcatagtagctattacctttgcaattgtggttcgaatctatccgatattctccttttcagggagagctaatgcttatgcttattgggtattttggtttgacactgcttcacgcccaaaaaaaggcaactatgtctgagttggatatggcccaaaaaaaggcagctatgtctgagttggatatggaagtcttctttcgtttagggtgaagtaagaccaagctcatgagcttattatcttaggtcggaacaaattagttgataggcatggcacatttatcaaattataatgattttaacagaaaagcaacacctctttttcagcagcaccagctttgcaagctgcaattgacactccaagcatagtatttgctccaaactcagcctgcatttcgcacaatatcatatctatttccatttggataaaatatattttccagaaatatgggaacagaatcaagatacagaaaaaagttgtggtagtagtggtaagtggaaacacaagtacagtgaaaagatagcattatttctgaacagtcaaattaaccgaaataagtagtatcacatactgcccctaaattgactacacccaatgtaaagaattgcttgagcatattgagccatcagttgtttgtttgtgtaacggatttgacaatgcagagttcaggagcaaaaaaccgcaaaggagagaaagagggaaaggatctcctagtatcccaccttgtggcgcgccctgtcaagtgcatgatggcctggtcgatctgcgtctgctgctgcggttccatcccaacgagtgcctccgacaccttgtcgttgatcacccgcaccgcgtaggcgacccccctggcgaggaacttccgcctctcggaggccccggccgcgtcggcggcggcgccctcgagcgcgcccacgctagccgtagatgctcggtgcacggccttgttggtgtgcaactcgacctcaacggccggtgcgctacgcccgtcaaggatctggcgcgcccgcaccctcgtgatcacggtgggcgcctcccgcctcatgtggccgacgatgaaaagcgccgggttaggggccttggcgcgcaccgccgtattcagggcctcctcgctcttgcgcgagagcaggtgcttccccaggtactcctgcactgacaaggctgccacagcggtggaatttgtcctcacgacttcgccacgtcgtcctcacctccctggcttcccacgactccgccgtatcgaggtgctcggtgggtcgtcttaatccgaagtccgaactaggaagacgagacagagaggtctgaggaatgggcctcgtttgatgttgagctgaattatttttccagcataagcccaggtcttggtccatgaacaaaattactagaaacccagcccagtactacgatctaaaagagggactgccactggatagctctctctagcattctccacgctccaatacagcggcgtcgtgtctatccgggtctatccgcgaacacgtgagaactctccagaaactgctttctcctccacttcatctctctcgctttccctctataaaaagaccccttctaggaattgagggagacagcaagcaccaagcagcgatccgaagctcaatcaattcactcaaacctcttccccaaatcttcgattagatcttcgttgacaagaagactagaaccgaacctgacatgtccaacctgctcacggttcaccagaaccttccggctcttccagtggacgcgacgtccgatgaagtcaggaagaacctcatggacatgttccgcgacaggcaagcgttcagcgagcacacctggaagatgctgctctccgtctgccgctcctgggctgcatggtgcaagctgaacaacaggaagtggttccccgctgagcccgaggacgtgagggattaccttctgtacctgcaagcgcgaggtttgtttctgcttctacctttgatatatatataataattatcattaattagtagtaatataatatttcaaatatttttttcaaaataaaagaatgtagtatatagcaattgcttttctgtagtttataagtgtgtatattttaatttataacttttctaatatatgaccaaaacatggtgatgcctaggtctggcagtgaagaccatccagcaacaccttggacaactgaacatgcttcacaggcgctccggcctcccgcgccccagcgactcgaacgccgtgagcctcgtcatgcgccgcatcaggaaggaaaacgtcgatgccggcgaaagggcaaagcaggccctcgcgttcgagaggaccgatttcgaccaggtccgcagcctgatggagaacagcgacaggtgccaggacattaggaacctggcgttcctcggaattgcatacaacacgctcctcaggatcgcggaaattgcccgcattcgcgtgaaggacattagccgcaccgacggcggcaggatgcttatccacattggcaggaccaagacgctcgtttccaccgcaggcgtcgaaaaggccctcagcctcggagtgaccaagctcgtcgaacgctggatctccgtgtccggcgtcgcggacgacccaaacaactacctcttctgccgcgtccgcaagaacggggtggctgcccctagcgccaccagccaactcagcacgagggccttggaaggtattttcgaggccacccaccgcctgatctacggcgcgaaggatgacagcggtcaacgctacctcgcatggtccgggcactccgcccgcgttggagctgctagggacatggcccgcgccggtgtttccatccccgaaatcatgcaggcgggtggatggacgaacgtgaacattgtcatgaactacattcgcaaccttgacagcgagacgggcgcaatggttcgcctcctggaagatggtgactgaggtacccaacctagacttgtccatcttctggattggccaacttaattaatgtatgaaataaaaggatgcacacatagtgacatgctaatcactataatgtgggcatcaaagttgtgtgttatgtgtaattactagttatctgaataaaagagaaagagatcatccatatttcttatcctaaatgaatgtcacgtgtctttataattctttgatgaaccagatgcatttcattaaccaaatccatatacatataaatattaatcatatataattaatatcaattgggttagcaaaacaaatctagtctaggtgtgttttgcgatccgatatcgaattggccacggtaccagctgctgctgttctagggttcacaagtctgcctatttgtcttccccaatggagctatggttgtctggtctggtccttggtcgtgtcccgtttcattgtgtactatttacctgtaatgtgtatccttaagtctggtttgatggtgtctgaaacgttttgctgtggtagagcagcatggaagaactataatgaataagtgatccctaatcattgtgtccaaattttgcttctgctatacccttttgtgctgtttcttatgttttgcttaaaaatttgatctgacaaacaaatttgtctaaattatgctcttgttctgactgtgtactgtacacatttgtattgctaccggtttggcacatagttttctctttgattgcagatcaaacccttctgattgcagattgcttggctatggctgatgtgctcactgttcttctttagcttgtatattgctgatggtggcttggctacggctgaaaaagttgctgctgcgccgacttggcaactgttgctccagtaatgctttgtcctctcttcctagccgccgacttggcacttggcagctgttgctcctgtaatgcgttgttatctcttatctcttgagatgtactatgattttgaggctgtttgacttgtgccagattgccagtgctgatgctatattatctcaggtttttatgctagtatatgttttactgtgtgctgcctgtgtcgagttacgtaatctattgaaccgctatgcgtgttgatgccctgttgttgcttgccagattgatgcccctgttgcttgcagcttgcaagctgtagtgaaatcctaaaattccaaaccaaatctattctgaacttttgaagatctgtgatgtccggaagaaaagattcaaacagataaacgggactctccagaatctataaaataaatgatcgacaaacgctttgctttggtaggcttcaagcttggtcacccggtccgggcctagaaggccagcttcggccgccccgggcaactttattatacaaagttgatagataaatcagatatctggttcctaaggacccggcggaccgattaaactgattcggtccgacgcgttacctaataacttcgtatagcatacattatacgaagttattagctaactaactagtaagcttaagccatgggtcgacggatccgttaactagcgtggcatttggcaccgccgcacactatgcgagctaggagtgctagtttacagatgaaactatgaaaccaagaaaacacaattgtccgtagctagcgcgtggcgtcgtgtcaagcttcacacagtatcttcgttcttcactataaatcgcgcctgttgttcgtgagacccaccaccgtggataacagtcccctaataataagcgatcaacagcactgctgatggctgaacaccgaggcgccgccgcgcgtaaccatccgccggagcagcccgtcgtgccggcgaacgacgccttccccgaccgcgcccagcagctctgcctcgacgccgggcgcgcgctcgcgatgtgcggcgtgctcgtcgccgtccctcccgcattttacgcgtcgacgtcgcggacgacaccgcacttgccttcgtcggcttcgtcctctggatcatcggtgcgtggctgtgcctcctggcgctcacgcccttggctccacgggcggtgagggcgggcggggccgccgccagcaccttgctgatcaggtgcctgtccctttcatgaactactagcgcccgcgcccgcggccgccgggcacaagagaacacatcgatgttcgctgcgtacgtcagcaataaggcactctttgtcagtagtcgagtgcatatgttgggtgtttgccctgggagatttcaagtgttgtggccattatcccgcaggataaaaaatcggcggcttttggattgatacggaaaataacgatgtttcatgctcgtgttgtgtgtgtgacatcttgtcagccaagtttttaaccgttgctactccccctctgtgggctcagtgtgtggaccggaatacgtcgtacataggccgtagcctaagcccaatatgccgtttttcaggttggcctgtgtgacgacaagcgggtctcaaaagcccatcacgcaactggcctgcaattattggaggagagcgcgtcgagttggttccagaggctgcgtggtggggccggactctgcgacgacctctcgttcgcgtccgatttggttgccgtgagccgtgacgtaacgcctccttccgttcctccctatataagttccacccccgggtccggtttccccaagccccagtgacccccgatcccgatcgcgaaatctccgcacccgccggcaagggaccgaagcaagcctctctcccgaccgtcgcatcaaggtacgcgtccgctcgatctgtcctcttccttctcgatttgacttgctgtggtgcccgatcacgggatcagaatcgcaccagtgtagatttcgcatgttctaagatgtgttagtttccaggctaatccagttctcttgacgcccgatccgatcgagctccgtgtttatttcagcctaatcgtagtattcccctaaaatttcctcattagggggttcgcaagattgttggtcgacaggttcacttatgctcgatcgcttacttttagtcgattcatgctgcgtactattgttgccccccgtggttttatcttttctcgtgtgaaatccagtagatatagtagatatcgtagcattaggttttaattcaatcgattgattattgtatcatcaaaattgagaagttcgaatcatgcctatcatgctgcctcaaccgaaatcctgtatattgaagtttcaattcaattgattgatcattcattagattcaaccaaaatctagaaggttagatgacgcatgtcatgctgcctgcgtagtttacctttgatctgtttatgattaccttatcagtaggatatttgtgattttgggaagtagcactaactgattcatgctgacatgatgttccctttcagattatactgttgagtcctatctaattgatgctttgtatgctatatgaatacgtcatggtaaattagcagttaattagcatattagcaattgggcgtacctcatcaggattgctcttgtagatgtgtgtggtgatgtttcttgttcaattcatgttctgctttaaaagtatgtgttctctgtttgttaattaagattcatggttataatgatttggacctaattaatcagggttgcccttttagatgcgtggttacttgttgagttcatttttttcctgctatagttgtatgcgtttgttcattcatggttagatttgatttgtttcttctctattccatgccttccatatacttcaattgtagcttaacatgagatttctgtatatgcaggtcgaccgccggggatccacacgacaccatggcccagtccaagcacggcctgaccaaggagatgaccatgaagtaccgcatggagggctgcgtggacggccacaagttcgtgatcaccggcgagggcatcggctaccccttcaagggcaagcaggccatcaacctgtgcgtggtggagggcggccccttgcccttcgccgaggacatcttgtccgccgccttcatgtacggcaaccgcgtgttcaccgagtacccccaggacatcgtcgactacttcaagaactcctgccccgccggctacacctgggaccgctccttcctgttcgaggacggcgccgtgtgcatctgcaacgccgacatcaccgtgagcgtggaggagaactgcatgtaccacgagtccaagttctacggcgtgaacttccccgccgacggccccgtgatgaagaagatgaccgacaactgggagccctcctgcgagaagatcatccccgtgcccaagcagggcatcttgaagggcgacgtgagcatgtacctgctgctgaaggacggtggccgcttgcgctgccagttcgacaccgtgtacaaggccaagtccgtgccccgcaagatgcccgactggcacttcatccagcacaagctgacccgcgaggaccgcagcgacgccaagaaccagaagtggcacctgaccgagcacgccatcgcctccggctccgccttgccctccggactcagatctcgatagagtcaacctagacttgtccatcttctggattggccaacttaattaatgtatgaaataaaaggatgcacacatagtgacatgctaatcactataatgtgggcatcaaagttgtgtgttatgtgtaattactagttatctgaataaaagagaaagagatcatccatatttcttatcctaaatgaatgtcacgtgtctttataattctttgatgaaccagatgcatttcattaaccaaatccatatacatataaatattaatcatatataattaatatcaattgggttagcaaaacaaatctagtctaggtgtgttttgcgaattgcggcgcccttactttaacgcctctaaccaacacccctttatctttataaggaacaataaacagaatttgccccactgttctaaatcacctaataatatccccagctaaaaacaataaaggtttcctagaattaagacaagcatgactgttcctccaggagggtttggaacattgttgcagtcttgcagatacgggcgaagggtgagaaacagagcggagggctggaggtgacctcggtagtcgacgccggagttgagcttgacaacgacggggcggcccctgatggacttgaggaagtccgatggcgtcttcaccgtcccgccggcgcccgaggcgggcctgtcgctgccgccgccgccgctgctcatcttgcgcgctgtgcccccggcggtgtccctgtgttgcggatcgcgggtgggccaggtggatgcgagggcgacccgtttggactccggccggagccgccggatccctggtcggtgtcagtgccgtttactctgggccccacgtgtcagtaccgtctgtagatgacaacaacccgtcgtccacagtcatgtccaaaatatcctttcttcttttttttcgattcggatatctatcttccttttttttttccaaaaatcttcttgacgcaccagcgcgcacgtttgtggtaaacgccgacacgtcggtcccacgtcgatagaccccacccaccagtgagtagcgtgtacgtattcgggggtgacggacgtgtcgccgtcgtcttgctagtcccattcccatctgagccacacatctctgaacaaaaaaaaggagggaggcctccacgcacatccccctccgtgccacccgccccaaaccctcgcgccgcctccgagacagccgccgcaaccatggccaccgccgccgccgcgtctaccgcgctcactggcgccactaccgctgcgcccaaggcgaggcgccgggcgcacctcctggccacccgccgcgccctcgccgcgcccatcaggtgctcagcggcgtcacccgccatgccgatggctcccccggccaccccgctccggccgtggggccccaccgagccccgcaagggtgctgacatcctcgtcgagtccctcgagcgctgcggcgtccgcgacgtcttcgcctaccccggcggcgcgtccatggagatccaccaggcactcacccgctcccccgtcatcgccaaccacctcttccgccacgagcaaggggaggcctttgccgcctccggctacgcgcgctcctcgggccgcgtcggcgtctgcatcgccacctccggccccggcgccaccaacctagtctccgcgctcgccgacgcgctgctcgattccgtccccatggtcgccatcacgggacaggtggcgcgacgcatgattggcaccgacgccttccaggagacgcccatcgtcgaggtcacccgctccatcaccaagcacaactacctggtcctcgacgtcgacgacatcccccgcgtcgtgcaggaggctttcttcctcgcctcctctggtcgaccagggccggtgcttgtcgacatccccaaggacatccagcagcagatggcggtgcctgtctgggacaagcccatgagtctgcctgggtacattgcgcgccttcccaagccccctgcgactgagttgcttgagcaggtgctgcgtcttgttggtgaatcgcggcgccctgttctttatgtgggcggtggctgcgcagcatctggtgaggagttgcgacgctttgtggagctgactggaatcccggtcacaactactcttatgggcctcggcaacttccccagcgacgacccactgtctctgcgcatgctaggtatgcatgggacggtgtatgcaaattatgcagtggataaggccgatctgttgcttgcacttggtgtgcggtttgatgatcgcgtgacagggaagattgaggcttttgcaagcagggctaagattgtgcacgttgatattgatccggctgagattggcaagaacaagcagccacatgtgtccatctgtgcagatgttaagcttgctttgcagggcatgaatgctcttcttgaaggaagcacatcaaagaagagctttgactttggctcatggaacgatgagttggatcagcagaagagggaattcccccttgggtataaaacatctaatgaggagatccagccacaatatgctattcaggttcttgatgagctgacgaaaggcgaggccatcatcggcacaggtgttgggcagcaccagatgtgggcggcacagtactacacttacaagcggccaaggcagtggttgtcttcagctggtcttggggctatgggatttggtttgccggctgctgctggtgcttctgtggcaaacccaggtgtcactgttgttgacatcgatggagatggtagctttctcatgaacgttcaggagctagctatgatccgaattgagaacctcccagtgaaggtctttgtgctaaacaaccagcacctggggatggtggtgcagttggaggacaggttctataaggccaacagagcgcacacatacttgggaaacccagagaatgaaagtgagatatatccagatttcgtgacgatcgccaaagggttcaacattccagcggtccgtgtgacaaagaagaacgaagtccgcgcagcgataaagaagatgctcgagactccagggccgtacctcttggatataatcgtcccacaccaggagcatgtgttgcctatgatccctagtggtggggctttcaaggatatgatcctggatggtgatggcaggactgtgtactgactagctagtcagttaacagatctgccagatcctcggtgtacaaataacccgtcttatcctatgagacgggccggcgtcagtgtgttctggaggaatttttatgtcagagcctttttctttgtgtgcttgatgtagatgccaagggaagcttattggctgttgaagcttgatgcaaaataaattatggaactctgttttttgtttatctaataataactagcaaatatgcttccattgcattgaaactaacagccttttgtgtttccaagttttattttgtgacaatgtcatctatttcaattagttgtggaatcggaaacttgcaggactaacttggaaactccaatccctcagcatcctggactttttcctggtgtaatccatgtagatattattttaatcatcattttagttctggaggtttttccatctccggttttgctcccctttcttcaaaaaaaaaaaaaaaatgccgtaggcgccgcaacgcccacctgttgttcaaactcatgggcacgagtggctcgaagattttatacaacaattgctgtagtttcaccgttgctggtgaagaagcatttttttaaaaaaatatagtggtattcattttaattagtttagttgtgcagcgagcaaaatttggacatgctctgctcggaatctgatcgacctagacacagattagcagcagtagctttgtcatctgttccaagagttgcgatctgatagaagaaaaaaaaaccttcccttcaatgtaaaaccgaaactaacaagaaagaagcacagtgccgtttaggcaagtatggagtacgtattaagcatgtagaaggccatgcatgaaccactaacaagaaagaagcgcagtgccattcaggcaagcataagcatgtagattggcatgcatgaacaactaacagtagatcgtctctggtctgattagaagttttttgggaagccaagaaatcatgtacaactggttccatctcaaattccgtggcaaaaagaggcctaagcaacatacctcgagtagatcacattcaagcttggtcacccggtccgtcaatattctgattccgatgacttcgtaggttcctagctcaagccgctcgtgtccaagcgtcacttacgattagctaatgattacggcatctaggaccgactagtggcgcgccgactagctagctaaggtaccgagctcgaattcattccgattaatcgtggcctcttgctcttcaggatgaagagctatgtttaaacgtgcaagcgctactagacaattcagtacattaaaaacgtccgcaatgtgttattaagttgtctaagcgtcaatttgtttacaccacaatatatcctgcca

SEQ ID NO: 266 - DNA, 23199 bp, Artificial Sequence
  PHP99679
gtttacccgccaatatatcctgtcaaacactgatagtttaaactgaaggcgggaaacgacaatctgatcatgagcggagaattaagggagtcacgttatgacccccgccgatgacgcgggacaagccgttttacgtttggaactgacagaaccgcaacgttgaaggagccactcagcaagctggtacgattgtaatacgactcactatagggcgaattgagcgctgtttaaacgctcttcaactggaagagcggttacgctgtttaaacgctcttcaactggaagagcggttactaccggttcactagctagctgctaatcgagctagttaccctatgaggtgacatgaagcgctcacggttactatgacggttagcttcacgactgttggtggcagtagcgtacgacttagctatagttccggacttacccttaagcgatttaaatctgcggttaccgaattcgagctcggtacctagtacccttgtacttttggtttcacctgcatagagaaaacccacaagaatatgacagtctgatttgtcagtctcattctcaagcaacatttctctatccgttactttcatggtgaataacacaatccatcatcaatactttgtgttactcagaaactgaaagttattccgagtcttgcatatctttggacctactcgtttttctaccattattgctgattgttaagctctcgctacttgaatcggcattgttggagtgggaaggttcaaaaaattggagttatgactagttgtctctttctatgtacgatggagaaaatgaataaacaactgagaaaatggctcttgtttagttgatgatgctcttaagctttccactggttgccatatatgatttgggcatttcactttgatcttaatgggccttgtaaagcccaagactcatgattatctttagttgatgctcttaattaggtgtgggcaaataattcaaactgtatgtacccgaccaaaaccaaagcaaaaataatcgaaccaaaccgaaaatttaaaaataaccgaatgaaaactaaatcctataactgaaagaactgaaaccgaatcaaaatatttaatgtaaccaaaaatatccgaaatataattatattgtcaaaaatattaataatttctagattaaataattaaaaatacttaaaaatttatataaaatagtaaaaatactcgaaaataaccacaaatattcaaaaacaaccgaaatatcccaaaatattcaaagcaaaataaccgaatggataccaaattttaaaaccgaaaaaactggaacaaaaccaaaatcgaaccaaaatttcaaaaatcgaataaatactaaactttagaacaaaaaaaaacgataaccgaatgtatacgaaccaaagccgaattagataaccgaacgtccaggactactcttaatctttccgccacttatgatttgggctattactttgtttataatgagccttttcaagctcaagttcatgattgtccgtgagatgagaaactgacttgttggattcgaaaccctagctagtattggttaatacttaatacataaatgacctgcattgacatcatcatccaagaaaataaaaattgtatgcttgagatatttagttttcctagctaggttttctttattttagtaccgaatctttaggtgtgccacgttaatttagacccattttttcatacttaccaactgagtctagtttaatcatgactataatcgtataaaatgattcagtcgacgtcattgcgaacgtatataaaatcatccaaattgacgtcattccaaagaggtaagcatgcttatctaagagtccgagcatactaaacaagacgacattttatttgcactccaaatcaaattttgtattgcctaaagaaaaacaatcaaactcaagtttcttaaaattaatttcattcaaactaatcactttcaatatctcacatattattcatgccatttctatttgtctaaacatgatttaaaaaaaaaagtaaaatacaaagattactatgcaaaaactctataaaaaaaaattcaaatttcttatttatttgtgacatcaaattttcaaaataatttttttaattatcggttgatccggtcagtcgataaaaacataaactttcagcgaccgttaaaactttcctactaccgatttagagaaaatcttagcttgaaacgtaattgtaacctgccttcatgcaagtcgcaagatatgtcatcctaagttgtatatgttttctcaaaagatgtatttacttgagaaaatacgtttcaacgttgatggacaaccaattaagaatcaagcacctttcgtaatcaatttaggcttatcgtctaaggtatactgatttacgacagttgactagacttataaggaacaaaataatagaatagtttctaaacacttcacctaatcatagagactaagatggtaattcgtaaacgacaaagcctagtgacactgtccattgtaaaattccacatcatattagtattaaacatatacatgtagtttcctgaacacatgtagtatcaaacacacttcgtggcttcttcctcgaaacctgcggccgcgctatagttccggacttacccttaagataacttcgtatagcatacattatacgaagttatgggcccacgcgtgaagagcggttaccagagctggtcacctttgtccaccaagatggaactgtcttcggccagaatggccatctggattcagcaggcctagaaggccatttatcgctatcaactttgtatagaaaagttgggccgaattcgagctcggtacggccagaatggcccggaccgaagcttgcggccgcacactgatagtttaaactgaaggcgggaaacgacaatctgatcatgagcggagaattaagggagtcacgttatgacccccgccgatgacgcgggacaagccgttttacgtttggaactgacagaaccgcaacgttgaaggagccactcagccgcgggtttctggagtttaatgagctaagcacatacgtcagaaaccattattgcgcgttcaaaagtcgcctaaggtcactatcagctagcaaatatttcttgtcaaaaatgctccactgacgttccataaattcccctcggtatccaattagagtctcatattcactctcccgggggatctcgactctagaggatcgctcaggaaggccgctgagatagaggcatggcggccaatgcgggcggcggtggagcgggaggaggcagcggcagcggcagcgtggctgcgccggcggtgtgccgccccagcggctcgcggtggacgccgacgccggagcagatcaggatgctgaaggagctctactacggctgcggcatccggtcgcccagctcggagcagatccagcgcatcaccgccatgctgcggcagcacggcaagatcgagggcaagaacgtcttctactggttccagaaccacaaggcccgcgagcgccagaagcgccgcctcaccagcctcgacgtcaacgtgcccgccgccggcgcggccgacgccaccaccagccaactcggcgtcctctcgctgtcgtcgccgccgccttcaggcgcggcgcctccctcgcccaccctcggcttctacgccgccggcaatggcggcggatcggctgtgctgctggacacgagttccgactggggcagcagcggcgctgccatggccaccgagacatgcttcctgcaggactacatgggcgtgacggacacgggcagctcgtcgcagtggccacgcttctcgtcgtcggacacgataatggcggcggccgcggcgcgggcggcgacgacgcgggcgcccgagacgctccctctcttcccgacctgcggcgacgacggcggcagcggtagcagcagctacttgccgttctggggtgccgcgtccacaactgccggcgccacttcttccgttgcgatccagcagcaacaccagctgcaggagcagtacagcttttacagcaacagcaacagcacccagctggccggcaccggcaaccaagacgtatcggcaacagcagcagcagccgccgccctggagctgagcctcagctcatggtgctccccttaccctgctgcagggagtatgtgagagcaacgcgagctgccactgctcttcactgatgtctctggaatggaaggaggaggaagtgagcatagcgttggtgcgttgctgtcaagggcgaattcacatggttaacctagacttgtccatcttctggattggccaacttaattaatgtatgaaataaaaggatgcacacatagtgacatgctaatcactataatgtgggcatcaaagttgtgtgttatgtgtaattactagttatctgaataaaagagaaagagatcatccatatttcttatcctaaatgaatgtcacgtgtctttataattctttgatgaaccagatgcatttcattaaccaaatccatatacatataaatattaatcatatataattaatatcaattgggttagcaaaacaaatctagtctaggtgtgttttgcgaatgcggccgccaccgcggtggagctcgaattccggtccgggcctagaaggccagcttcaagtttgtacaaaaaagcaggctccggccagaatggcccggaccgggttaccgaattcgagctcggtaccgtccatgggtatccgaaacctgaatacctgattagaagacgggtatgggatggttcctttaccaattaatgggaaagaacgtctactcgtttggtagacgggtataggtggatactaccccatacccgtctacccgtaaaaaatatgctcgcaacataccaatattatcatctaataaagcccatcttaactagaaggaaccccttgttcgaatattatttgtttaattatcaagttatgtagtcatgtggtttgttatatttgaagttcaacttatttttatatgtttgtttgtcattctgagtgattggcatattacaatttaagatttttctagcggtacgggctacccgatggataaaattacctacgcggggtatgtgtacgagtaagattgtatattgtgagtgtatatgggcaactcgacgaacatatttttttggtggatacaagtatggaatgctattacctgtcaggtttatattcattgccatctctatccccatatggtgattgtcctcctacattcgtgacaattccccaaggagcaacaggcgacattgatgtcacttcgaacaaatctgcttactttaatgcttcataattttaacaacaaagaggatggaggaagacaacagataaaatatcgataaatacacatatttaaaaaaaatccacactattttaggctcacaatagtttttaaagtccatatttcttagatccatgaatggctactacactcaattaactctattgatggcaacaataaaaagagatcaaaattatgggtaaatagccaacacatataactccaccgcataagcgcgtcaccacaatacccaaaacaactaaagaaccgatggtcgatgagcgatcataagatcaacctctttaacaacatctacaaccgtttgtgcacagcctgattgagtgacccaatgaggctatgctgctttaagcggttaaggaaaatttccacaacaagcatagaaaaaacaagttggagcacacgtgacacgttatgccattagctcaagtggtgcgtaaaacacgatgataatgactcgagtgatgagagaaaaagatatgttcttaacttggacgacaatcaaagctcaatgacatatgaaagtatggacacactatgctctattgtcaccatagggcaagagttcagtagaaggcaaattgttcgacaacaagctatgttggtcttttgattctgacgagtcaatgatagcttttcaatgatactattaactttctaaaattaggaagcaacaaaaaatctacaaaaaacatactttttaacttttggtaaaagctaaacttttttgagttttttcccgaaagcacgcctagtcagccaccagctggcacgcgagtctcccaacaataggagggaccacctgtcatgctgtgggaccacgaagaaaaccctccagagacgacgatagacctccgtccatagacgcggtctaccgtggtccggacgctcccggccgcgaattcaggtcgtggcgggccctgccgacccaactactggtccagaggcctccacgcgagccgtgggccgtggtctaggagccgggtccgcctatctacttgacggtcacggaaacccggacccggtaggaaggagctataaagacaagccaaacgagggcatcccttcttcagccgcacgcttcttgttgccaaagaattccctcccctagccgccgccgccgccgctcgtctccctgagaggtgccgggaccgaggaactggccgagtactaggtagagaatcggtttttcttgtctcagcccggggtctgctgcgtctggtggtggtgaaggggagaaattcgtgagatctgttccggatcaggcgtgcgagctcgggaatcaggggtttcacacatagcttcgtcgatttgtaagttttttctagccgattcctctctttttgtacgttttttgttattagattcgagatttgttggatgtgttggtttatgttgctgcctttctagatttctcggtgtgaatgtatgagggttcgatccttaggcatgaaaacatagctacatggagttagctcgttttcttaagtcacgtggtggtcggcgttatacctgttgcttgatgcgttatccgtgctatcgctgttcagatttagataggtggatcggtcatttgttcgttgtacgtattttgttacttcaaaattgatgctaaccctgttaattgaaaattgatggcagtggatacgctccacctttgtttagatttggaaacatggttaggaaatatgtgttcatattaggaaacgtggataggaaatatggctcattaccctggtactcggaaaagtaaggaaaaactattaacctttttgtttaggttttgattcgtggacaagatctataaattcactgaaaagacgcatacgatttcttgtacaggtgatatcatgccatgtggaaagtaaatgaaatcatacaaggctgatttttgcttttgttcccatcagatctgtgatttagttttgttttcccaaacaggttatgtttggtcatgtactcatgtgaatgatatagatctgttgctctaattagttagaaacatttattttgggcatatatctttaatggcataactgtggtacgttgtgatggtttattttagctgtcgtgcctggatcatcaacatcttgttttatcttttatgagaagaatttttgttcgatttgatggatgtgttcaatattttggtcttccatgcaggaatttgatgtactaatggagtctaagggtggcaaaaagtctagcagtagtcgttctatgatgtatgaagctccccttggctacagcattgaggacgttcgacctgccggaggcgtgaagaagttccagtctgctgcttactccaacgtaaaaaatcaatcatcacaatgatgctcttcattctacctcttgtattttattagatatatgttgatagtaacatctattttttcttgttgcagtgcgcgaagaagccatcctgatatcccttttggcttcctcattctagtagtttaggatttcttttctgacactttgattctgaccaatctctctggcctgctgcttcctgataatcgaccagttccccagtcttgctccttgcactcctccctccatctccagcattgtgttctgattcacctgctccaggatccatggccactgtgaacaactggctcgctttctccctctccccgcaggagctgccgccctcccagacgacggactccacactcatctcggccgccaccgccgaccatgtctccggcgatgtctgcttcaacatcccccaagattggagcatgaggggatcagagctttcggcgctcgtcgcggagccgaagctggaggacttcctcggcggcatctccttctccgagcagcatcacaaggccaactgcaacatgatacccagcactagcagcacagtttgctacgcgagctcaggtgctagcaccggctaccatcaccagctgtaccaccagcccaccagctcagcgctccacttcgcggactccgtaatggtggcttcctcggccggtgtccacgacggcggtgccatgctcagcgcggccgccgctaacggtgtcgctggcgctgccagtgccaacggcggcggcatcgggctgtccatgattaagaactggctgcggagccaaccggcgcccatgcagccgagggtggcggcggctgagggcgcgcaggggctctctttgtccatgaacatggcggggacgacccaaggcgctgctggcatgccacttctcgctggagagcgcgcacgggcgcccgagagtgtatcgacgtcagcacagggtggagccgtcgtcgtcacggcgccgaaggaggatagcggtggcagcggtgttgccggcgctctagtagccgtgagcacggacacgggtggcagcggcggcgcgtcggctgacaacacggcaaggaagacggtggacacgttcgggcagcgcacgtcgatttaccgtggcgtgacaaggcatagatggactgggagatatgaggcacatctttgggataacagttgcagaagggaagggcaaactcgtaagggtcgtcaagtctatttaggtggctatgataaagaggagaaagctgctagggcttatgatcttgctgctctgaagtactggggtgccacaacaacaacaaattttccagtgagtaactacgaaaaggagctcgaggacatgaagcacatgacaaggcaggagtttgtagcgtctctgagaaggaagagcagtggtttctccagaggtgcatccatttacaggggagtgactaggcatcaccaacatggaagatggcaagcacggattggacgagttgcagggaacaaggatctttacttgggcaccttcagcacccaggaggaggcagcggaggcgtacgacatcgcggcgatcaagttccgcggcctcaacgccgtcaccaacttcgacatgagccgctacgacgtgaagagcatcctggacagcagcgccctccccatcggcagcgccgccaagcgcctcaaggaggccgaggccgcagcgtccgcgcagcaccaccacgccggcgtggtgagctacgacgtcggccgcatcgcctcgcagctcggcgacggcggagccctggcggcggcgtacggcgcgcactaccacggcgccgcctggccgaccatcgcgttccagccgggcgccgccagcacaggcctgtaccacccgtacgcgcagcagccaatgcgcggcggcgggtggtgcaagcaggagcaggaccacgcggtgatcgcggccgcgcacagcctgcaggacctccaccacctgaacctgggcgcggccggcgcgcacgactttttctcggcagggcagcaggccgccgccgctgcgatgcacggcctgggtagcatcgacagtgcgtcgctcgagcacagcaccggctccaactccgtcgtctacaacggcggggtcggcgacagcaacggcgccagcgccgtcggcggcagtggcggtggctacatgatgccgatgagcgctgccggagcaaccactacatcggcaatggtgagccacgagcaggtgcatgcacgggcctacgacgaagccaagcaggctgctcagatggggtacgagagctacctggtgaacgcggagaacaatggtggcggaaggatgtctgcatgggggactgtcgtgtctgcagccgcggcggcagcagcaagcagcaacgacaacatggccgccgacgtcgggcatggcggcgcgcagctcttcagtgtctggaacgacacttaagcgtacgtgccggcctggctctccgaaagggcgtattccagcacactggcggccgttactagacccaacctagacttgtccatcttctggattggccaacttaattaatgtatgaaataaaaggatgcacacatagtgacatgctaatcactataatgtgggcatcaaagttgtgtgttatgtgtaattactagttatctgaataaaagagaaagagatcatccatatttcttatcctaaatgaatgtcacgtgtctttataattctttgatgaaccagatgcatttcattaaccaaatccatatacatataaatattaatcatatataattaatatcaattgggttagcaaaacaaatctagtctaggtgtgttttgcgaatgcggcctccgggcacccagctttcttgtacaaagtggccgttaacggatcggccagaatggcccggaccgggttaccccgcggttcaaagccaatgactgttgttaggtccagtttctaaggacgaatcatccaatcactggttctttctgaacaaaacaaagagctatagagttacgttactgtagccgagacagagcctgcaatctggttatgccacatactaggttctttcttaaagttgactcactctatcctaagttctacttacaaggagctacaacaaattggtcataaccggagagcgttcaaggaggtaatatcccatcttactctgtagcaaggctacaaaaggagagctaaagaactaggctacaaaaagagagctaaagaactaactatctagcaagactacagagctatagtgtagagatttcataaccggtgagcgttcaaggatactttgaagagaagaggtaatatctcaactagcaagactacaaaaaaatggagatataaaactaactgtctaacaagactacagagctatagtagagatagatacgttcgacacttaagcatgagaattcgagctcggtaccctggttcacaaactcaatacaacacacagtggagtagggtattacgctccggcggcccgaaccactctaaatccttgtgtcctcgtgtgctcttccaccattaatgactgtaattgcagggacacgaagagttgtagcgcttttgccaacaagatccgctatatgctagtagagtggaacctgcacagcaacaagcatccaataatctgagaataagaattatgtgtggtgatggttctcatctctgcaactcgccattttcgcgagagaaccaaatccaagttggtgaagatcatgatttgggctcatgggctggcatagtagctattacctttgcaattgtggttcgaatctatccgatattctccttttcagggagagctaatgcttatgcttattgggtattttggtttgacactgcttcacgcccaaaaaaaggcaactatgtctgagttggatatggcccaaaaaaaggcagctatgtctgagttggatatggaagtcttctttcgtttagggtgaagtaagaccaagctcatgagcttattatcttaggtcggaacaaattagttgataggcatggcacatttatcaaattataatgattttaacagaaaagcaacacctctttttcagcagcaccagctttgcaagctgcaattgacactccaagcatagtatttgctccaaactcagcctgcatttcgcacaatatcatatctatttccatttggataaaatatattttccagaaatatgggaacagaatcaagatacagaaaaaagttgtggtagtagtggtaagtggaaacacaagtacagtgaaaagatagcattatttctgaacagtcaaattaaccgaaataagtagtatcacatactgcccctaaattgactacacccaatgtaaagaattgcttgagcatattgagccatcagttgtttgtttgtgtaacggatttgacaatgcagagttcaggagcaaaaaaccgcaaaggagagaaagagggaaaggatctcctagtatcccaccttgtggcgcgccctgtcaagtgcatgatggcctggtcgatctgcgtctgctgctgcggttccatcccaacgagtgcctccgacaccttgtcgttgatcacccgcaccgcgtaggcgacccccctggcgaggaacttccgcctctcggaggccccggccgcgtcggcggcggcgccctcgagcgcgcccacgctagccgtagatgctcggtgcacggccttgttggtgtgcaactcgacctcaacggccggtgcgctacgcccgtcaaggatctggcgcgcccgcaccctcgtgatcacggtgggcgcctcccgcctcatgtggccgacgatgaaaagcgccgggttaggggccttggcgcgcaccgccgtattcagggcctcctcgctcttgcgcgagagcaggtgcttccccaggtactcctgcactgacaaggctgccacagcggtggaatttgtcctcacgacttcgccacgtcgtcctcacctccctggcttcccacgactccgccgtatcgaggtgctcggtgggtcgtcttaatccgaagtccgaactaggaagacgagacagagaggtctgaggaatgggcctcgtttgatgttgagctgaattatttttccagcataagcccaggtcttggtccatgaacaaaattactagaaacccagcccagtactacgatctaaaagagggactgccactggatagctctctctagcattctccacgctccaatacagcggcgtcgtgtctatccgggtctatccgcgaacacgtgagaactctccagaaactgctttctcctccacttcatctctctcgctttccctctataaaaagaccccttctaggaattgagggagacagcaagcaccaagcagcgatccgaagctcaatcaattcactcaaacctcttccccaaatcttcgattagatcttcgttgacaagaagactagaaccgaacctgacatgtccaacctgctcacggttcaccagaaccttccggctcttccagtggacgcgacgtccgatgaagtcaggaagaacctcatggacatgttccgcgacaggcaagcgttcagcgagcacacctggaagatgctgctctccgtctgccgctcctgggctgcatggtgcaagctgaacaacaggaagtggttccccgctgagcccgaggacgtgagggattaccttctgtacctgcaagcgcgaggtttgtttctgcttctacctttgatatatatataataattatcattaattagtagtaatataatatttcaaatatttttttcaaaataaaagaatgtagtatatagcaattgcttttctgtagtttataagtgtgtatattttaatttataacttttctaatatatgaccaaaacatggtgatgcctaggtctggcagtgaagaccatccagcaacaccttggacaactgaacatgcttcacaggcgctccggcctcccgcgccccagcgactcgaacgccgtgagcctcgtcatgcgccgcatcaggaaggaaaacgtcgatgccggcgaaagggcaaagcaggccctcgcgttcgagaggaccgatttcgaccaggtccgcagcctgatggagaacagcgacaggtgccaggacattaggaacctggcgttcctcggaattgcatacaacacgctcctcaggatcgcggaaattgcccgcattcgcgtgaaggacattagccgcaccgacggcggcaggatgcttatccacattggcaggaccaagacgctcgtttccaccgcaggcgtcgaaaaggccctcagcctcggagtgaccaagctcgtcgaacgctggatctccgtgtccggcgtcgcggacgacccaaacaactacctcttctgccgcgtccgcaagaacggggtggctgcccctagcgccaccagccaactcagcacgagggccttggaaggtattttcgaggccacccaccgcctgatctacggcgcgaaggatgacagcggtcaacgctacctcgcatggtccgggcactccgcccgcgttggagctgctagggacatggcccgcgccggtgtttccatccccgaaatcatgcaggcgggtggatggacgaacgtgaacattgtcatgaactacattcgcaaccttgacagcgagacgggcgcaatggttcgcctcctggaagatggtgactgaggtacccaacctagacttgtccatcttctggattggccaacttaattaatgtatgaaataaaaggatgcacacatagtgacatgctaatcactataatgtgggcatcaaagttgtgtgttatgtgtaattactagttatctgaataaaagagaaagagatcatccatatttcttatcctaaatgaatgtcacgtgtctttataattctttgatgaaccagatgcatttcattaaccaaatccatatacatataaatattaatcatatataattaatatcaattgggttagcaaaacaaatctagtctaggtgtgttttgcgatccgatatcgaattggccacggtaccagctgctgctgttctagggttcacaagtctgcctatttgtcttccccaatggagctatggttgtctggtctggtccttggtcgtgtcccgtttcattgtgtactatttacctgtaatgtgtatccttaagtctggtttgatggtgtctgaaacgttttgctgtggtagagcagcatggaagaactataatgaataagtgatccctaatcattgtgtccaaattttgcttctgctatacccttttgtgctgtttcttatgttttgcttaaaaatttgatctgacaaacaaatttgtctaaattatgctcttgttctgactgtgtactgtacacatttgtattgctaccggtttggcacatagttttctctttgattgcagatcaaacccttctgattgcagattgcttggctatggctgatgtgctcactgttcttctttagcttgtatattgctgatggtggcttggctacggctgaaaaagttgctgctgcgccgacttggcaactgttgctccagtaatgctttgtcctctcttcctagccgccgacttggcacttggcagctgttgctcctgtaatgcgttgttatctcttatctcttgagatgtactatgattttgaggctgtttgacttgtgccagattgccagtgctgatgctatattatctcaggtttttatgctagtatatgttttactgtgtgctgcctgtgtcgagttacgtaatctattgaaccgctatgcgtgttgatgccctgttgttgcttgccagattgatgcccctgttgcttgcagcttgcaagctgtagtgaaatcctaaaattccaaaccaaatctattctgaacttttgaagatctgtgatgtccggaagaaaagattcaaacagataaacgggactctccagaatctataaaataaatgatcgacaaacgctttgctttggtaggcttcaagcttggtcacccggtccgggcctagaaggccagcttcggccgccccgggcaactttattatacaaagttgatagataaatcagatatctggttcctaaggacccggcggaccgattaaactgattcggtccgacgcgttacctaataacttcgtatagcatacattatacgaagttattagctaactaactagtaagcttaagccatgggtcgacggatccgttaactagcgtggcatttggcaccgccgcacactatgcgagctaggagtgctagtttacagatgaaactatgaaaccaagaaaacacaattgtccgtagctagcgcgtggcgtcgtgtcaagcttcacacagtatcttcgttcttcactataaatcgcgcctgttgttcgtgagacccaccaccgtggataacagtcccctaataataagcgatcaacagcactgctgatggctgaacaccgaggcgccgccgcgcgtaaccatccgccggagcagcccgtcgtgccggcgaacgacgccttccccgaccgcgcccagcagctctgcctcgacgccgggcgcgcgctcgcgatgtgcggcgtgctcgtcgccgtccctcccgcattttacgcgtcgacgtcgcggacgacaccgcacttgccttcgtcggcttcgtcctctggatcatcggtgcgtggctgtgcctcctggcgctcacgcccttggctccacgggcggtgagggcgggcggggccgccgccagcaccttgctgatcaggtgcctgtccctttcatgaactactagcgcccgcgcccgcggccgccgggcacaagagaacacatcgatgttcgctgcgtacgtcagcaataaggcactctttgtcagtagtcgagtgcatatgttgggtgtttgccctgggagatttcaagtgttgtggccattatcccgcaggataaaaaatcggcggcttttggattgatacggaaaataacgatgtttcatgctcgtgttgtgtgtgtgacatcttgtcagccaagtttttaaccgttgctactccccctctgtgggctcagtgtgtggaccggaatacgtcgtacataggccgtagcctaagcccaatatgccgtttttcaggttggcctgtgtgacgacaagcgggtctcaaaagcccatcacgcaactggcctgcaattattggaggagagcgcgtcgagttggttccagaggctgcgtggtggggccggactctgcgacgacctctcgttcgcgtccgatttggttgccgtgagccgtgacgtaacgcctccttccgttcctccctatataagttccacccccgggtccggtttccccaagccccagtgacccccgatcccgatcgcgaaatctccgcacccgccggcaagggaccgaagcaagcctctctcccgaccgtcgcatcaaggtacgcgtccgctcgatctgtcctcttccttctcgatttgacttgctgtggtgcccgatcacgggatcagaatcgcaccagtgtagatttcgcatgttctaagatgtgttagtttccaggctaatccagttctcttgacgcccgatccgatcgagctccgtgtttatttcagcctaatcgtagtattcccctaaaatttcctcattagggggttcgcaagattgttggtcgacaggttcacttatgctcgatcgcttacttttagtcgattcatgctgcgtactattgttgccccccgtggttttatcttttctcgtgtgaaatccagtagatatagtagatatcgtagcattaggttttaattcaatcgattgattattgtatcatcaaaattgagaagttcgaatcatgcctatcatgctgcctcaaccgaaatcctgtatattgaagtttcaattcaattgattgatcattcattagattcaaccaaaatctagaaggttagatgacgcatgtcatgctgcctgcgtagtttacctttgatctgtttatgattaccttatcagtaggatatttgtgattttgggaagtagcactaactgattcatgctgacatgatgttccctttcagattatactgttgagtcctatctaattgatgctttgtatgctatatgaatacgtcatggtaaattagcagttaattagcatattagcaattgggcgtacctcatcaggattgctcttgtagatgtgtgtggtgatgtttcttgttcaattcatgttctgctttaaaagtatgtgttctctgtttgttaattaagattcatggttataatgatttggacctaattaatcagggttgcccttttagatgcgtggttacttgttgagttcatttttttcctgctatagttgtatgcgtttgttcattcatggttagatttgatttgtttcttctctattccatgccttccatatacttcaattgtagcttaacatgagatttctgtatatgcaggtcgaccgccggggatccacacgacaccatggcccagtccaagcacggcctgaccaaggagatgaccatgaagtaccgcatggagggctgcgtggacggccacaagttcgtgatcaccggcgagggcatcggctaccccttcaagggcaagcaggccatcaacctgtgcgtggtggagggcggccccttgcccttcgccgaggacatcttgtccgccgccttcatgtacggcaaccgcgtgttcaccgagtacccccaggacatcgtcgactacttcaagaactcctgccccgccggctacacctgggaccgctccttcctgttcgaggacggcgccgtgtgcatctgcaacgccgacatcaccgtgagcgtggaggagaactgcatgtaccacgagtccaagttctacggcgtgaacttccccgccgacggccccgtgatgaagaagatgaccgacaactgggagccctcctgcgagaagatcatccccgtgcccaagcagggcatcttgaagggcgacgtgagcatgtacctgctgctgaaggacggtggccgcttgcgctgccagttcgacaccgtgtacaaggccaagtccgtgccccgcaagatgcccgactggcacttcatccagcacaagctgacccgcgaggaccgcagcgacgccaagaaccagaagtggcacctgaccgagcacgccatcgcctccggctccgccttgccctccggactcagatctcgatagagtcaacctagacttgtccatcttctggattggccaacttaattaatgtatgaaataaaaggatgcacacatagtgacatgctaatcactataatgtgggcatcaaagttgtgtgttatgtgtaattactagttatctgaataaaagagaaagagatcatccatatttcttatcctaaatgaatgtcacgtgtctttataattctttgatgaaccagatgcatttcattaaccaaatccatatacatataaatattaatcatatataattaatatcaattgggttagcaaaacaaatctagtctaggtgtgttttgcgaattgcggcgcccttactttaacgcctctaaccaacacccctttatctttataaggaacaataaacagaatttgccccactgttctaaatcacctaataatatccccagctaaaaacaataaaggtttcctagaattaagacaagcatgactgttcctccaggagggtttggaacattgttgcagtcttgcagatacgggcgaagggtgagaaacagagcggagggctggaggtgacctcggtagtcgacgccggagttgagcttgacaacgacggggcggcccctgatggacttgaggaagtccgatggcgtcttcaccgtcccgccggcgcccgaggcgggcctgtcgctgccgccgccgccgctgctcatcttgcgcgctgtgcccccggcggtgtccctgtgttgcggatcgcgggtgggccaggtggatgcgagggcgacccgtttggactccggccggagccgccggatccctggtcggtgtcagtgccgtttactctgggccccacgtgtcagtaccgtctgtagatgacaacaacccgtcgtccacagtcatgtccaaaatatcctttcttcttttttttcgattcggatatctatcttccttttttttttccaaaaatcttcttgacgcaccagcgcgcacgtttgtggtaaacgccgacacgtcggtcccacgtcgatagaccccacccaccagtgagtagcgtgtacgtattcgggggtgacggacgtgtcgccgtcgtcttgctagtcccattcccatctgagccacacatctctgaacaaaaaaaaggagggaggcctccacgcacatccccctccgtgccacccgccccaaaccctcgcgccgcctccgagacagccgccgcaaccatggccaccgccgccgccgcgtctaccgcgctcactggcgccactaccgctgcgcccaaggcgaggcgccgggcgcacctcctggccacccgccgcgccctcgccgcgcccatcaggtgctcagcggcgtcacccgccatgccgatggctcccccggccaccccgctccggccgtggggccccaccgagccccgcaagggtgctgacatcctcgtcgagtccctcgagcgctgcggcgtccgcgacgtcttcgcctaccccggcggcgcgtccatggagatccaccaggcactcacccgctcccccgtcatcgccaaccacctcttccgccacgagcaaggggaggcctttgccgcctccggctacgcgcgctcctcgggccgcgtcggcgtctgcatcgccacctccggccccggcgccaccaacctagtctccgcgctcgccgacgcgctgctcgattccgtccccatggtcgccatcacgggacaggtggcgcgacgcatgattggcaccgacgccttccaggagacgcccatcgtcgaggtcacccgctccatcaccaagcacaactacctggtcctcgacgtcgacgacatcccccgcgtcgtgcaggaggctttcttcctcgcctcctctggtcgaccagggccggtgcttgtcgacatccccaaggacatccagcagcagatggcggtgcctgtctgggacaagcccatgagtctgcctgggtacattgcgcgccttcccaagccccctgcgactgagttgcttgagcaggtgctgcgtcttgttggtgaatcgcggcgccctgttctttatgtgggcggtggctgcgcagcatctggtgaggagttgcgacgctttgtggagctgactggaatcccggtcacaactactcttatgggcctcggcaacttccccagcgacgacccactgtctctgcgcatgctaggtatgcatgggacggtgtatgcaaattatgcagtggataaggccgatctgttgcttgcacttggtgtgcggtttgatgatcgcgtgacagggaagattgaggcttttgcaagcagggctaagattgtgcacgttgatattgatccggctgagattggcaagaacaagcagccacatgtgtccatctgtgcagatgttaagcttgctttgcagggcatgaatgctcttcttgaaggaagcacatcaaagaagagctttgactttggctcatggaacgatgagttggatcagcagaagagggaattcccccttgggtataaaacatctaatgaggagatccagccacaatatgctattcaggttcttgatgagctgacgaaaggcgaggccatcatcggcacaggtgttgggcagcaccagatgtgggcggcacagtactacacttacaagcggccaaggcagtggttgtcttcagctggtcttggggctatgggatttggtttgccggctgctgctggtgcttctgtggcaaacccaggtgtcactgttgttgacatcgatggagatggtagctttctcatgaacgttcaggagctagctatgatccgaattgagaacctcccagtgaaggtctttgtgctaaacaaccagcacctggggatggtggtgcagttggaggacaggttctataaggccaacagagcgcacacatacttgggaaacccagagaatgaaagtgagatatatccagatttcgtgacgatcgccaaagggttcaacattccagcggtccgtgtgacaaagaagaacgaagtccgcgcagcgataaagaagatgctcgagactccagggccgtacctcttggatataatcgtcccacaccaggagcatgtgttgcctatgatccctagtggtggggctttcaaggatatgatcctggatggtgatggcaggactgtgtactgactagctagtcagttaacagatctgccagatcctcggtgtacaaataacccgtcttatcctatgagacgggccggcgtcagtgtgttctggaggaatttttatgtcagagcctttttctttgtgtgcttgatgtagatgccaagggaagcttattggctgttgaagcttgatgcaaaataaattatggaactctgttttttgtttatctaataataactagcaaatatgcttccattgcattgaaactaacagccttttgtgtttccaagttttattttgtgacaatgtcatctatttcaattagttgtggaatcggaaacttgcaggactaacttggaaactccaatccctcagcatcctggactttttcctggtgtaatccatgtagatattattttaatcatcattttagttctggaggtttttccatctccggttttgctcccctttcttcaaaaaaaaaaaaaaaatgccgtaggcgccgcaacgcccacctgttgttcaaactcatgggcacgagtggctcgaagattttatacaacaattgctgtagtttcaccgttgctggtgaagaagcatttttttaaaaaaatatagtggtattcattttaattagtttagttgtgcagcgagcaaaatttggacatgctctgctcggaatctgatcgacctagacacagattagcagcagtagctttgtcatctgttccaagagttgcgatctgatagaagaaaaaaaaaccttcccttcaatgtaaaaccgaaactaacaagaaagaagcacagtgccgtttaggcaagtatggagtacgtattaagcatgtagaaggccatgcatgaaccactaacaagaaagaagcgcagtgccattcaggcaagcataagcatgtagattggcatgcatgaacaactaacagtagatcgtctctggtctgattagaagttttttgggaagccaagaaatcatgtacaactggttccatctcaaattccgtggcaaaaagaggcctaagcaacatacctcgagtagatcacattcaagcttggtcacccggtccgtcaatattctgattccgatgacttcgtaggttcctagctcaagccgctcgtgtccaagcgtcacttacgattagctaatgattacggcatctaggaccgactagtggcgcgccgactagctagctaaggtaccgagctcgaattcattccgattaatcgtggcctcttgctcttcaggatgaagagctatgtttaaacgtgcaagcgctactagacaattcagtacattaaaaacgtccgcaatgtgttattaagttgtctaagcgtcaatttgtttacaccacaatatatcctgcca

SEQ ID NO: 267 - DNA, 21787 bp, Artificial Sequence
  PHP99680
gtttacccgccaatatatcctgtcaaacactgatagtttaaactgaaggcgggaaacgacaatctgatcatgagcggagaattaagggagtcacgttatgacccccgccgatgacgcgggacaagccgttttacgtttggaactgacagaaccgcaacgttgaaggagccactcagcaagctggtacgattgtaatacgactcactatagggcgaattgagcgctgtttaaacgctcttcaactggaagagcggttacgctgtttaaacgctcttcaactggaagagcggttactaccggttcactagctagctgctaatcgagctagttaccctatgaggtgacatgaagcgctcacggttactatgacggttagcttcacgactgttggtggcagtagcgtacgacttagctatagttccggacttacccttaagcgatttaaatctgcggttaccgaattcgagctcggtacctagtacccttgtacttttggtttcacctgcatagagaaaacccacaagaatatgacagtctgatttgtcagtctcattctcaagcaacatttctctatccgttactttcatggtgaataacacaatccatcatcaatactttgtgttactcagaaactgaaagttattccgagtcttgcatatctttggacctactcgtttttctaccattattgctgattgttaagctctcgctacttgaatcggcattgttggagtgggaaggttcaaaaaattggagttatgactagttgtctctttctatgtacgatggagaaaatgaataaacaactgagaaaatggctcttgtttagttgatgatgctcttaagctttccactggttgccatatatgatttgggcatttcactttgatcttaatgggccttgtaaagcccaagactcatgattatctttagttgatgctcttaattaggtgtgggcaaataattcaaactgtatgtacccgaccaaaaccaaagcaaaaataatcgaaccaaaccgaaaatttaaaaataaccgaatgaaaactaaatcctataactgaaagaactgaaaccgaatcaaaatatttaatgtaaccaaaaatatccgaaatataattatattgtcaaaaatattaataatttctagattaaataattaaaaatacttaaaaatttatataaaatagtaaaaatactcgaaaataaccacaaatattcaaaaacaaccgaaatatcccaaaatattcaaagcaaaataaccgaatggataccaaattttaaaaccgaaaaaactggaacaaaaccaaaatcgaaccaaaatttcaaaaatcgaataaatactaaactttagaacaaaaaaaaacgataaccgaatgtatacgaaccaaagccgaattagataaccgaacgtccaggactactcttaatctttccgccacttatgatttgggctattactttgtttataatgagccttttcaagctcaagttcatgattgtccgtgagatgagaaactgacttgttggattcgaaaccctagctagtattggttaatacttaatacataaatgacctgcattgacatcatcatccaagaaaataaaaattgtatgcttgagatatttagttttcctagctaggttttctttattttagtaccgaatctttaggtgtgccacgttaatttagacccattttttcatacttaccaactgagtctagtttaatcatgactataatcgtataaaatgattcagtcgacgtcattgcgaacgtatataaaatcatccaaattgacgtcattccaaagaggtaagcatgcttatctaagagtccgagcatactaaacaagacgacattttatttgcactccaaatcaaattttgtattgcctaaagaaaaacaatcaaactcaagtttcttaaaattaatttcattcaaactaatcactttcaatatctcacatattattcatgccatttctatttgtctaaacatgatttaaaaaaaaaagtaaaatacaaagattactatgcaaaaactctataaaaaaaaattcaaatttcttatttatttgtgacatcaaattttcaaaataatttttttaattatcggttgatccggtcagtcgataaaaacataaactttcagcgaccgttaaaactttcctactaccgatttagagaaaatcttagcttgaaacgtaattgtaacctgccttcatgcaagtcgcaagatatgtcatcctaagttgtatatgttttctcaaaagatgtatttacttgagaaaatacgtttcaacgttgatggacaaccaattaagaatcaagcacctttcgtaatcaatttaggcttatcgtctaaggtatactgatttacgacagttgactagacttataaggaacaaaataatagaatagtttctaaacacttcacctaatcatagagactaagatggtaattcgtaaacgacaaagcctagtgacactgtccattgtaaaattccacatcatattagtattaaacatatacatgtagtttcctgaacacatgtagtatcaaacacacttcgtggcttcttcctcgaaacctgcggccgcgctatagttccggacttacccttaagataacttcgtatagcatacattatacgaagttatgggcccacgcgtgaagagcggttaccagagctggtcacctttgtccaccaagatggaactgtcttcggccagaatggccatctggattcagcaggcctagaaggccatttatcgctatcaactttgtatagaaaagttgggccgaattcgagctcggtacggccagaatggcccggaccgaagcttgcggccgcacactgatagtttaaactgaaggcgggaaacgacaatctgatcatgagcggagaattaagggagtcacgttatgacccccgccgatgacgcgggacaagccgttttacgtttggaactgacagaaccgcaacgttgaaggagccactcagccgcgggtttctggagtttaatgagctaagcacatacgtcagaaaccattattgcgcgttcaaaagtcgcctaaggtcactatcagctagcaaatatttcttgtcaaaaatgctccactgacgttccataaattcccctcggtatccaattagagtctcatattcactctcccgggggatctcgactctagaggatcgctcaggaaggccgctgagatagaggcatggcggccaatgcgggcggcggtggagcgggaggaggcagcggcagcggcagcgtggctgcgccggcggtgtgccgccccagcggctcgcggtggacgccgacgccggagcagatcaggatgctgaaggagctctactacggctgcggcatccggtcgcccagctcggagcagatccagcgcatcaccgccatgctgcggcagcacggcaagatcgagggcaagaacgtcttctactggttccagaaccacaaggcccgcgagcgccagaagcgccgcctcaccagcctcgacgtcaacgtgcccgccgccggcgcggccgacgccaccaccagccaactcggcgtcctctcgctgtcgtcgccgccgccttcaggcgcggcgcctccctcgcccaccctcggcttctacgccgccggcaatggcggcggatcggctgtgctgctggacacgagttccgactggggcagcagcggcgctgccatggccaccgagacatgcttcctgcaggactacatgggcgtgacggacacgggcagctcgtcgcagtggccacgcttctcgtcgtcggacacgataatggcggcggccgcggcgcgggcggcgacgacgcgggcgcccgagacgctccctctcttcccgacctgcggcgacgacggcggcagcggtagcagcagctacttgccgttctggggtgccgcgtccacaactgccggcgccacttcttccgttgcgatccagcagcaacaccagctgcaggagcagtacagcttttacagcaacagcaacagcacccagctggccggcaccggcaaccaagacgtatcggcaacagcagcagcagccgccgccctggagctgagcctcagctcatggtgctccccttaccctgctgcagggagtatgtgagagcaacgcgagctgccactgctcttcactgatgtctctggaatggaaggaggaggaagtgagcatagcgttggtgcgttgctgtcaagggcgaattcacatggttaacctagacttgtccatcttctggattggccaacttaattaatgtatgaaataaaaggatgcacacatagtgacatgctaatcactataatgtgggcatcaaagttgtgtgttatgtgtaattactagttatctgaataaaagagaaagagatcatccatatttcttatcctaaatgaatgtcacgtgtctttataattctttgatgaaccagatgcatttcattaaccaaatccatatacatataaatattaatcatatataattaatatcaattgggttagcaaaacaaatctagtctaggtgtgttttgcgaatgcggccgccaccgcggtggagctcgaattccggtccgggcctagaaggccagcttcaagtttgtacaaaaaagcaggctccggccagaatggcccggaccgggttaccgaattcgagctcggtaccatttaaatgccttcagttggttttgctcctttttatttaaaccctttcttggactttttattggtttgtgttgaacctttggcacctgtagaacttataatctagagcaaactagttagtccaattatttgtgttgggcaattcaaccaccaaaattatttaggaaaaggtttgagcctatttccctttcagccgccacccttgccgtcgtcgtcgccattgttgccatcgtcctcgttgcatgctcacgatgaggttgtacctgatggatcgcgcagagcatgctcacgatgaggttgaggtatggcgtgttctgtacgacttcatcctctgtcaatgctcttgcgtcaccttccatcatgcgtgggcatgcaccaggtatggcgtgttgtcatgtactttctggtacattggttgttactatggaggctttgttgctgtggtctcccttggtactgcatacatggcctaaacacggttgggtgatgttgtgtcttgtcgcggaagtcgtggatcgatggtgtctgtctgggttccctccttgcgggttcgcgtggcggggactcgatcgtccgtcctgcctcgtaggcttgcctgacgaggacttggtcgttcgtcctgcctcgcaggcttgctcggcgaggacttggtcgttcctcccacctcgcggacttgctcggcaaatgggtcgtggagagtatgggcctcactatgggcaccccatttcctggtacccgacatagtgactaaaagtgactaaaatgagctttttaccccaccacctgccctcccccacgtgagctatgcgctgaacgagcaaagaagtaaataggggtaatgcagtaaatatacgtagtagttaatgctctttagtcagatttagtcactgacaccaaacgagatactttagtgactactaaagtttagtcaggtgactaaagaaaccaaacataacccttagtgtgaaccgatttaggcacactagcatatatcccgtgttaacgctacgatcttgaagagggaggagtcaacgacggcggtggcgcaagtggataagttgacgacagcgacgatgacaatgtgagtgaggagaagggggcagtggggacgcagaggatggaagagggggagggggtggataggggcagcagggtgggaggagggagagcgcgagtgagggagagagggcgccgggacgcatgggaagaggaagagatgaatcaaataatattatatattaaatttgagtaagtaagagagatttatctaacgatccgaattgttggttttgatgatctgttaagtttaggtgtaatttgtttgatggatttagtgatgattatatgtgtgggggtgatttagtttggttggttttacaaaagtttaaattttttttagattatatagtggtatagatagtcaaacagtagcggcaatgacatcacggtaaatgcgcgttggcatccaaatgcagctggacacaggtcacacagcctaacggatatatcatatatgtgaatcctaactgtacactgtctgaagtggacgaacggctctggcttcggcgtgttacgtgtatagtaggccccttttgaacgaacggcgcgggccggggccaccaccagcatctgcggcagggagaatcgcgttggttcgacgcaaacgctacccggcgcccccttgcccttggggccggctattttaccgcacccgttctcccctctctaccgcagatcagatcacactcgtagagagaaggaaaaatatccccaaaccctagctcccgatctcgggatccatggccactgtgaacaactggctcgctttctccctctccccgcaggagctgccgccctcccagacgacggactccacactcatctcggccgccaccgccgaccatgtctccggcgatgtctgcttcaacatcccccaagattggagcatgaggggatcagagctttcggcgctcgtcgcggagccgaagctggaggacttcctcggcggcatctccttctccgagcagcatcacaaggccaactgcaacatgatacccagcactagcagcacagtttgctacgcgagctcaggtgctagcaccggctaccatcaccagctgtaccaccagcccaccagctcagcgctccacttcgcggactccgtaatggtggcttcctcggccggtgtccacgacggcggtgccatgctcagcgcggccgccgctaacggtgtcgctggcgctgccagtgccaacggcggcggcatcgggctgtccatgattaagaactggctgcggagccaaccggcgcccatgcagccgagggtggcggcggctgagggcgcgcaggggctctctttgtccatgaacatggcggggacgacccaaggcgctgctggcatgccacttctcgctggagagcgcgcacgggcgcccgagagtgtatcgacgtcagcacagggtggagccgtcgtcgtcacggcgccgaaggaggatagcggtggcagcggtgttgccggcgctctagtagccgtgagcacggacacgggtggcagcggcggcgcgtcggctgacaacacggcaaggaagacggtggacacgttcgggcagcgcacgtcgatttaccgtggcgtgacaaggcatagatggactgggagatatgaggcacatctttgggataacagttgcagaagggaagggcaaactcgtaagggtcgtcaagtctatttaggtggctatgataaagaggagaaagctgctagggcttatgatcttgctgctctgaagtactggggtgccacaacaacaacaaattttccagtgagtaactacgaaaaggagctcgaggacatgaagcacatgacaaggcaggagtttgtagcgtctctgagaaggaagagcagtggtttctccagaggtgcatccatttacaggggagtgactaggcatcaccaacatggaagatggcaagcacggattggacgagttgcagggaacaaggatctttacttgggcaccttcagcacccaggaggaggcagcggaggcgtacgacatcgcggcgatcaagttccgcggcctcaacgccgtcaccaacttcgacatgagccgctacgacgtgaagagcatcctggacagcagcgccctccccatcggcagcgccgccaagcgcctcaaggaggccgaggccgcagcgtccgcgcagcaccaccacgccggcgtggtgagctacgacgtcggccgcatcgcctcgcagctcggcgacggcggagccctggcggcggcgtacggcgcgcactaccacggcgccgcctggccgaccatcgcgttccagccgggcgccgccagcacaggcctgtaccacccgtacgcgcagcagccaatgcgcggcggcgggtggtgcaagcaggagcaggaccacgcggtgatcgcggccgcgcacagcctgcaggacctccaccacctgaacctgggcgcggccggcgcgcacgactttttctcggcagggcagcaggccgccgccgctgcgatgcacggcctgggtagcatcgacagtgcgtcgctcgagcacagcaccggctccaactccgtcgtctacaacggcggggtcggcgacagcaacggcgccagcgccgtcggcggcagtggcggtggctacatgatgccgatgagcgctgccggagcaaccactacatcggcaatggtgagccacgagcaggtgcatgcacgggcctacgacgaagccaagcaggctgctcagatggggtacgagagctacctggtgaacgcggagaacaatggtggcggaaggatgtctgcatgggggactgtcgtgtctgcagccgcggcggcagcagcaagcagcaacgacaacatggccgccgacgtcgggcatggcggcgcgcagctcttcagtgtctggaacgacacttaagcgtacgtgccggcctggctctccgaaagggcgtattccagcacactggcggccgttactagacccaacctagacttgtccatcttctggattggccaacttaattaatgtatgaaataaaaggatgcacacatagtgacatgctaatcactataatgtgggcatcaaagttgtgtgttatgtgtaattactagttatctgaataaaagagaaagagatcatccatatttcttatcctaaatgaatgtcacgtgtctttataattctttgatgaaccagatgcatttcattaaccaaatccatatacatataaatattaatcatatataattaatatcaattgggttagcaaaacaaatctagtctaggtgtgttttgcgaatgcggcctccgggcacccagctttcttgtacaaagtggccgttaacggatcggccagaatggcccggaccgggttaccccgcggttcaaagccaatgactgttgttaggtccagtttctaaggacgaatcatccaatcactggttctttctgaacaaaacaaagagctatagagttacgttactgtagccgagacagagcctgcaatctggttatgccacatactaggttctttcttaaagttgactcactctatcctaagttctacttacaaggagctacaacaaattggtcataaccggagagcgttcaaggaggtaatatcccatcttactctgtagcaaggctacaaaaggagagctaaagaactaggctacaaaaagagagctaaagaactaactatctagcaagactacagagctatagtgtagagatttcataaccggtgagcgttcaaggatactttgaagagaagaggtaatatctcaactagcaagactacaaaaaaatggagatataaaactaactgtctaacaagactacagagctatagtagagatagatacgttcgacacttaagcatgagaattcgagctcggtaccctggttcacaaactcaatacaacacacagtggagtagggtattacgctccggcggcccgaaccactctaaatccttgtgtcctcgtgtgctcttccaccattaatgactgtaattgcagggacacgaagagttgtagcgcttttgccaacaagatccgctatatgctagtagagtggaacctgcacagcaacaagcatccaataatctgagaataagaattatgtgtggtgatggttctcatctctgcaactcgccattttcgcgagagaaccaaatccaagttggtgaagatcatgatttgggctcatgggctggcatagtagctattacctttgcaattgtggttcgaatctatccgatattctccttttcagggagagctaatgcttatgcttattgggtattttggtttgacactgcttcacgcccaaaaaaaggcaactatgtctgagttggatatggcccaaaaaaaggcagctatgtctgagttggatatggaagtcttctttcgtttagggtgaagtaagaccaagctcatgagcttattatcttaggtcggaacaaattagttgataggcatggcacatttatcaaattataatgattttaacagaaaagcaacacctctttttcagcagcaccagctttgcaagctgcaattgacactccaagcatagtatttgctccaaactcagcctgcatttcgcacaatatcatatctatttccatttggataaaatatattttccagaaatatgggaacagaatcaagatacagaaaaaagttgtggtagtagtggtaagtggaaacacaagtacagtgaaaagatagcattatttctgaacagtcaaattaaccgaaataagtagtatcacatactgcccctaaattgactacacccaatgtaaagaattgcttgagcatattgagccatcagttgtttgtttgtgtaacggatttgacaatgcagagttcaggagcaaaaaaccgcaaaggagagaaagagggaaaggatctcctagtatcccaccttgtggcgcgccctgtcaagtgcatgatggcctggtcgatctgcgtctgctgctgcggttccatcccaacgagtgcctccgacaccttgtcgttgatcacccgcaccgcgtaggcgacccccctggcgaggaacttccgcctctcggaggccccggccgcgtcggcggcggcgccctcgagcgcgcccacgctagccgtagatgctcggtgcacggccttgttggtgtgcaactcgacctcaacggccggtgcgctacgcccgtcaaggatctggcgcgcccgcaccctcgtgatcacggtgggcgcctcccgcctcatgtggccgacgatgaaaagcgccgggttaggggccttggcgcgcaccgccgtattcagggcctcctcgctcttgcgcgagagcaggtgcttccccaggtactcctgcactgacaaggctgccacagcggtggaatttgtcctcacgacttcgccacgtcgtcctcacctccctggcttcccacgactccgccgtatcgaggtgctcggtgggtcgtcttaatccgaagtccgaactaggaagacgagacagagaggtctgaggaatgggcctcgtttgatgttgagctgaattatttttccagcataagcccaggtcttggtccatgaacaaaattactagaaacccagcccagtactacgatctaaaagagggactgccactggatagctctctctagcattctccacgctccaatacagcggcgtcgtgtctatccgggtctatccgcgaacacgtgagaactctccagaaactgctttctcctccacttcatctctctcgctttccctctataaaaagaccccttctaggaattgagggagacagcaagcaccaagcagcgatccgaagctcaatcaattcactcaaacctcttccccaaatcttcgattagatcttcgttgacaagaagactagaaccgaacctgacatgtccaacctgctcacggttcaccagaaccttccggctcttccagtggacgcgacgtccgatgaagtcaggaagaacctcatggacatgttccgcgacaggcaagcgttcagcgagcacacctggaagatgctgctctccgtctgccgctcctgggctgcatggtgcaagctgaacaacaggaagtggttccccgctgagcccgaggacgtgagggattaccttctgtacctgcaagcgcgaggtttgtttctgcttctacctttgatatatatataataattatcattaattagtagtaatataatatttcaaatatttttttcaaaataaaagaatgtagtatatagcaattgcttttctgtagtttataagtgtgtatattttaatttataacttttctaatatatgaccaaaacatggtgatgcctaggtctggcagtgaagaccatccagcaacaccttggacaactgaacatgcttcacaggcgctccggcctcccgcgccccagcgactcgaacgccgtgagcctcgtcatgcgccgcatcaggaaggaaaacgtcgatgccggcgaaagggcaaagcaggccctcgcgttcgagaggaccgatttcgaccaggtccgcagcctgatggagaacagcgacaggtgccaggacattaggaacctggcgttcctcggaattgcatacaacacgctcctcaggatcgcggaaattgcccgcattcgcgtgaaggacattagccgcaccgacggcggcaggatgcttatccacattggcaggaccaagacgctcgtttccaccgcaggcgtcgaaaaggccctcagcctcggagtgaccaagctcgtcgaacgctggatctccgtgtccggcgtcgcggacgacccaaacaactacctcttctgccgcgtccgcaagaacggggtggctgcccctagcgccaccagccaactcagcacgagggccttggaaggtattttcgaggccacccaccgcctgatctacggcgcgaaggatgacagcggtcaacgctacctcgcatggtccgggcactccgcccgcgttggagctgctagggacatggcccgcgccggtgtttccatccccgaaatcatgcaggcgggtggatggacgaacgtgaacattgtcatgaactacattcgcaaccttgacagcgagacgggcgcaatggttcgcctcctggaagatggtgactgaggtacccaacctagacttgtccatcttctggattggccaacttaattaatgtatgaaataaaaggatgcacacatagtgacatgctaatcactataatgtgggcatcaaagttgtgtgttatgtgtaattactagttatctgaataaaagagaaagagatcatccatatttcttatcctaaatgaatgtcacgtgtctttataattctttgatgaaccagatgcatttcattaaccaaatccatatacatataaatattaatcatatataattaatatcaattgggttagcaaaacaaatctagtctaggtgtgttttgcgatccgatatcgaattggccacggtaccagctgctgctgttctagggttcacaagtctgcctatttgtcttccccaatggagctatggttgtctggtctggtccttggtcgtgtcccgtttcattgtgtactatttacctgtaatgtgtatccttaagtctggtttgatggtgtctgaaacgttttgctgtggtagagcagcatggaagaactataatgaataagtgatccctaatcattgtgtccaaattttgcttctgctatacccttttgtgctgtttcttatgttttgcttaaaaatttgatctgacaaacaaatttgtctaaattatgctcttgttctgactgtgtactgtacacatttgtattgctaccggtttggcacatagttttctctttgattgcagatcaaacccttctgattgcagattgcttggctatggctgatgtgctcactgttcttctttagcttgtatattgctgatggtggcttggctacggctgaaaaagttgctgctgcgccgacttggcaactgttgctccagtaatgctttgtcctctcttcctagccgccgacttggcacttggcagctgttgctcctgtaatgcgttgttatctcttatctcttgagatgtactatgattttgaggctgtttgacttgtgccagattgccagtgctgatgctatattatctcaggtttttatgctagtatatgttttactgtgtgctgcctgtgtcgagttacgtaatctattgaaccgctatgcgtgttgatgccctgttgttgcttgccagattgatgcccctgttgcttgcagcttgcaagctgtagtgaaatcctaaaattccaaaccaaatctattctgaacttttgaagatctgtgatgtccggaagaaaagattcaaacagataaacgggactctccagaatctataaaataaatgatcgacaaacgctttgctttggtaggcttcaagcttggtcacccggtccgggcctagaaggccagcttcggccgccccgggcaactttattatacaaagttgatagataaatcagatatctggttcctaaggacccggcggaccgattaaactgattcggtccgacgcgttacctaataacttcgtatagcatacattatacgaagttattagctaactaactagtaagcttaagccatgggtcgacggatccgttaactagcgtggcatttggcaccgccgcacactatgcgagctaggagtgctagtttacagatgaaactatgaaaccaagaaaacacaattgtccgtagctagcgcgtggcgtcgtgtcaagcttcacacagtatcttcgttcttcactataaatcgcgcctgttgttcgtgagacccaccaccgtggataacagtcccctaataataagcgatcaacagcactgctgatggctgaacaccgaggcgccgccgcgcgtaaccatccgccggagcagcccgtcgtgccggcgaacgacgccttccccgaccgcgcccagcagctctgcctcgacgccgggcgcgcgctcgcgatgtgcggcgtgctcgtcgccgtccctcccgcattttacgcgtcgacgtcgcggacgacaccgcacttgccttcgtcggcttcgtcctctggatcatcggtgcgtggctgtgcctcctggcgctcacgcccttggctccacgggcggtgagggcgggcggggccgccgccagcaccttgctgatcaggtgcctgtccctttcatgaactactagcgcccgcgcccgcggccgccgggcacaagagaacacatcgatgttcgctgcgtacgtcagcaataaggcactctttgtcagtagtcgagtgcatatgttgggtgtttgccctgggagatttcaagtgttgtggccattatcccgcaggataaaaaatcggcggcttttggattgatacggaaaataacgatgtttcatgctcgtgttgtgtgtgtgacatcttgtcagccaagtttttaaccgttgctactccccctctgtgggctcagtgtgtggaccggaatacgtcgtacataggccgtagcctaagcccaatatgccgtttttcaggttggcctgtgtgacgacaagcgggtctcaaaagcccatcacgcaactggcctgcaattattggaggagagcgcgtcgagttggttccagaggctgcgtggtggggccggactctgcgacgacctctcgttcgcgtccgatttggttgccgtgagccgtgacgtaacgcctccttccgttcctccctatataagttccacccccgggtccggtttccccaagccccagtgacccccgatcccgatcgcgaaatctccgcacccgccggcaagggaccgaagcaagcctctctcccgaccgtcgcatcaaggtacgcgtccgctcgatctgtcctcttccttctcgatttgacttgctgtggtgcccgatcacgggatcagaatcgcaccagtgtagatttcgcatgttctaagatgtgttagtttccaggctaatccagttctcttgacgcccgatccgatcgagctccgtgtttatttcagcctaatcgtagtattcccctaaaatttcctcattagggggttcgcaagattgttggtcgacaggttcacttatgctcgatcgcttacttttagtcgattcatgctgcgtactattgttgccccccgtggttttatcttttctcgtgtgaaatccagtagatatagtagatatcgtagcattaggttttaattcaatcgattgattattgtatcatcaaaattgagaagttcgaatcatgcctatcatgctgcctcaaccgaaatcctgtatattgaagtttcaattcaattgattgatcattcattagattcaaccaaaatctagaaggttagatgacgcatgtcatgctgcctgcgtagtttacctttgatctgtttatgattaccttatcagtaggatatttgtgattttgggaagtagcactaactgattcatgctgacatgatgttccctttcagattatactgttgagtcctatctaattgatgctttgtatgctatatgaatacgtcatggtaaattagcagttaattagcatattagcaattgggcgtacctcatcaggattgctcttgtagatgtgtgtggtgatgtttcttgttcaattcatgttctgctttaaaagtatgtgttctctgtttgttaattaagattcatggttataatgatttggacctaattaatcagggttgcccttttagatgcgtggttacttgttgagttcatttttttcctgctatagttgtatgcgtttgttcattcatggttagatttgatttgtttcttctctattccatgccttccatatacttcaattgtagcttaacatgagatttctgtatatgcaggtcgaccgccggggatccacacgacaccatggcccagtccaagcacggcctgaccaaggagatgaccatgaagtaccgcatggagggctgcgtggacggccacaagttcgtgatcaccggcgagggcatcggctaccccttcaagggcaagcaggccatcaacctgtgcgtggtggagggcggccccttgcccttcgccgaggacatcttgtccgccgccttcatgtacggcaaccgcgtgttcaccgagtacccccaggacatcgtcgactacttcaagaactcctgccccgccggctacacctgggaccgctccttcctgttcgaggacggcgccgtgtgcatctgcaacgccgacatcaccgtgagcgtggaggagaactgcatgtaccacgagtccaagttctacggcgtgaacttccccgccgacggccccgtgatgaagaagatgaccgacaactgggagccctcctgcgagaagatcatccccgtgcccaagcagggcatcttgaagggcgacgtgagcatgtacctgctgctgaaggacggtggccgcttgcgctgccagttcgacaccgtgtacaaggccaagtccgtgccccgcaagatgcccgactggcacttcatccagcacaagctgacccgcgaggaccgcagcgacgccaagaaccagaagtggcacctgaccgagcacgccatcgcctccggctccgccttgccctccggactcagatctcgatagagtcaacctagacttgtccatcttctggattggccaacttaattaatgtatgaaataaaaggatgcacacatagtgacatgctaatcactataatgtgggcatcaaagttgtgtgttatgtgtaattactagttatctgaataaaagagaaagagatcatccatatttcttatcctaaatgaatgtcacgtgtctttataattctttgatgaaccagatgcatttcattaaccaaatccatatacatataaatattaatcatatataattaatatcaattgggttagcaaaacaaatctagtctaggtgtgttttgcgaattgcggcgcccttactttaacgcctctaaccaacacccctttatctttataaggaacaataaacagaatttgccccactgttctaaatcacctaataatatccccagctaaaaacaataaaggtttcctagaattaagacaagcatgactgttcctccaggagggtttggaacattgttgcagtcttgcagatacgggcgaagggtgagaaacagagcggagggctggaggtgacctcggtagtcgacgccggagttgagcttgacaacgacggggcggcccctgatggacttgaggaagtccgatggcgtcttcaccgtcccgccggcgcccgaggcgggcctgtcgctgccgccgccgccgctgctcatcttgcgcgctgtgcccccggcggtgtccctgtgttgcggatcgcgggtgggccaggtggatgcgagggcgacccgtttggactccggccggagccgccggatccctggtcggtgtcagtgccgtttactctgggccccacgtgtcagtaccgtctgtagatgacaacaacccgtcgtccacagtcatgtccaaaatatcctttcttcttttttttcgattcggatatctatcttccttttttttttccaaaaatcttcttgacgcaccagcgcgcacgtttgtggtaaacgccgacacgtcggtcccacgtcgatagaccccacccaccagtgagtagcgtgtacgtattcgggggtgacggacgtgtcgccgtcgtcttgctagtcccattcccatctgagccacacatctctgaacaaaaaaaaggagggaggcctccacgcacatccccctccgtgccacccgccccaaaccctcgcgccgcctccgagacagccgccgcaaccatggccaccgccgccgccgcgtctaccgcgctcactggcgccactaccgctgcgcccaaggcgaggcgccgggcgcacctcctggccacccgccgcgccctcgccgcgcccatcaggtgctcagcggcgtcacccgccatgccgatggctcccccggccaccccgctccggccgtggggccccaccgagccccgcaagggtgctgacatcctcgtcgagtccctcgagcgctgcggcgtccgcgacgtcttcgcctaccccggcggcgcgtccatggagatccaccaggcactcacccgctcccccgtcatcgccaaccacctcttccgccacgagcaaggggaggcctttgccgcctccggctacgcgcgctcctcgggccgcgtcggcgtctgcatcgccacctccggccccggcgccaccaacctagtctccgcgctcgccgacgcgctgctcgattccgtccccatggtcgccatcacgggacaggtggcgcgacgcatgattggcaccgacgccttccaggagacgcccatcgtcgaggtcacccgctccatcaccaagcacaactacctggtcctcgacgtcgacgacatcccccgcgtcgtgcaggaggctttcttcctcgcctcctctggtcgaccagggccggtgcttgtcgacatccccaaggacatccagcagcagatggcggtgcctgtctgggacaagcccatgagtctgcctgggtacattgcgcgccttcccaagccccctgcgactgagttgcttgagcaggtgctgcgtcttgttggtgaatcgcggcgccctgttctttatgtgggcggtggctgcgcagcatctggtgaggagttgcgacgctttgtggagctgactggaatcccggtcacaactactcttatgggcctcggcaacttccccagcgacgacccactgtctctgcgcatgctaggtatgcatgggacggtgtatgcaaattatgcagtggataaggccgatctgttgcttgcacttggtgtgcggtttgatgatcgcgtgacagggaagattgaggcttttgcaagcagggctaagattgtgcacgttgatattgatccggctgagattggcaagaacaagcagccacatgtgtccatctgtgcagatgttaagcttgctttgcagggcatgaatgctcttcttgaaggaagcacatcaaagaagagctttgactttggctcatggaacgatgagttggatcagcagaagagggaattcccccttgggtataaaacatctaatgaggagatccagccacaatatgctattcaggttcttgatgagctgacgaaaggcgaggccatcatcggcacaggtgttgggcagcaccagatgtgggcggcacagtactacacttacaagcggccaaggcagtggttgtcttcagctggtcttggggctatgggatttggtttgccggctgctgctggtgcttctgtggcaaacccaggtgtcactgttgttgacatcgatggagatggtagctttctcatgaacgttcaggagctagctatgatccgaattgagaacctcccagtgaaggtctttgtgctaaacaaccagcacctggggatggtggtgcagttggaggacaggttctataaggccaacagagcgcacacatacttgggaaacccagagaatgaaagtgagatatatccagatttcgtgacgatcgccaaagggttcaacattccagcggtccgtgtgacaaagaagaacgaagtccgcgcagcgataaagaagatgctcgagactccagggccgtacctcttggatataatcgtcccacaccaggagcatgtgttgcctatgatccctagtggtggggctttcaaggatatgatcctggatggtgatggcaggactgtgtactgactagctagtcagttaacagatctgccagatcctcggtgtacaaataacccgtcttatcctatgagacgggccggcgtcagtgtgttctggaggaatttttatgtcagagcctttttctttgtgtgcttgatgtagatgccaagggaagcttattggctgttgaagcttgatgcaaaataaattatggaactctgttttttgtttatctaataataactagcaaatatgcttccattgcattgaaactaacagccttttgtgtttccaagttttattttgtgacaatgtcatctatttcaattagttgtggaatcggaaacttgcaggactaacttggaaactccaatccctcagcatcctggactttttcctggtgtaatccatgtagatattattttaatcatcattttagttctggaggtttttccatctccggttttgctcccctttcttcaaaaaaaaaaaaaaaatgccgtaggcgccgcaacgcccacctgttgttcaaactcatgggcacgagtggctcgaagattttatacaacaattgctgtagtttcaccgttgctggtgaagaagcatttttttaaaaaaatatagtggtattcattttaattagtttagttgtgcagcgagcaaaatttggacatgctctgctcggaatctgatcgacctagacacagattagcagcagtagctttgtcatctgttccaagagttgcgatctgatagaagaaaaaaaaaccttcccttcaatgtaaaaccgaaactaacaagaaagaagcacagtgccgtttaggcaagtatggagtacgtattaagcatgtagaaggccatgcatgaaccactaacaagaaagaagcgcagtgccattcaggcaagcataagcatgtagattggcatgcatgaacaactaacagtagatcgtctctggtctgattagaagttttttgggaagccaagaaatcatgtacaactggttccatctcaaattccgtggcaaaaagaggcctaagcaacatacctcgagtagatcacattcaagcttggtcacccggtccgtcaatattctgattccgatgacttcgtaggttcctagctcaagccgctcgtgtccaagcgtcacttacgattagctaatgattacggcatctaggaccgactagtggcgcgccgactagctagctaaggtaccgagctcgaattcattccgattaatcgtggcctcttgctcttcaggatgaagagctatgtttaaacgtgcaagcgctactagacaattcagtacattaaaaacgtccgcaatgtgttattaagttgtctaagcgtcaatttgtttacaccacaatatatcctgcca

SEQ ID NO: 268 - DNA, 22179 bp, Artificial Sequence
  PHP99569
gtttacccgccaatatatcctgtcaaacactgatagtttaaactgaaggcgggaaacgacaatctgatcatgagcggagaattaagggagtcacgttatgacccccgccgatgacgcgggacaagccgttttacgtttggaactgacagaaccgcaacgttgaaggagccactcagcaagctggtacgattgtaatacgactcactatagggcgaattgagcgctgtttaaacgctcttcaactggaagagcggttacgctgtttaaacgctcttcaactggaagagcggttactaccggttcactagctagctgctaatcgagctagttaccctatgaggtgacatgaagcgctcacggttactatgacggttagcttcacgactgttggtggcagtagcgtacgacttagctatagttccggacttacccttaagcgatttaaatctgcggttaccgaattcgagctcggtacctagtacccttgtacttttggtttcacctgcatagagaaaacccacaagaatatgacagtctgatttgtcagtctcattctcaagcaacatttctctatccgttactttcatggtgaataacacaatccatcatcaatactttgtgttactcagaaactgaaagttattccgagtcttgcatatctttggacctactcgtttttctaccattattgctgattgttaagctctcgctacttgaatcggcattgttggagtgggaaggttcaaaaaattggagttatgactagttgtctctttctatgtacgatggagaaaatgaataaacaactgagaaaatggctcttgtttagttgatgatgctcttaagctttccactggttgccatatatgatttgggcatttcactttgatcttaatgggccttgtaaagcccaagactcatgattatctttagttgatgctcttaattaggtgtgggcaaataattcaaactgtatgtacccgaccaaaaccaaagcaaaaataatcgaaccaaaccgaaaatttaaaaataaccgaatgaaaactaaatcctataactgaaagaactgaaaccgaatcaaaatatttaatgtaaccaaaaatatccgaaatataattatattgtcaaaaatattaataatttctagattaaataattaaaaatacttaaaaatttatataaaatagtaaaaatactcgaaaataaccacaaatattcaaaaacaaccgaaatatcccaaaatattcaaagcaaaataaccgaatggataccaaattttaaaaccgaaaaaactggaacaaaaccaaaatcgaaccaaaatttcaaaaatcgaataaatactaaactttagaacaaaaaaaaacgataaccgaatgtatacgaaccaaagccgaattagataaccgaacgtccaggactactcttaatctttccgccacttatgatttgggctattactttgtttataatgagccttttcaagctcaagttcatgattgtccgtgagatgagaaactgacttgttggattcgaaaccctagctagtattggttaatacttaatacataaatgacctgcattgacatcatcatccaagaaaataaaaattgtatgcttgagatatttagttttcctagctaggttttctttattttagtaccgaatctttaggtgtgccacgttaatttagacccattttttcatacttaccaactgagtctagtttaatcatgactataatcgtataaaatgattcagtcgacgtcattgcgaacgtatataaaatcatccaaattgacgtcattccaaagaggtaagcatgcttatctaagagtccgagcatactaaacaagacgacattttatttgcactccaaatcaaattttgtattgcctaaagaaaaacaatcaaactcaagtttcttaaaattaatttcattcaaactaatcactttcaatatctcacatattattcatgccatttctatttgtctaaacatgatttaaaaaaaaaagtaaaatacaaagattactatgcaaaaactctataaaaaaaaattcaaatttcttatttatttgtgacatcaaattttcaaaataatttttttaattatcggttgatccggtcagtcgataaaaacataaactttcagcgaccgttaaaactttcctactaccgatttagagaaaatcttagcttgaaacgtaattgtaacctgccttcatgcaagtcgcaagatatgtcatcctaagttgtatatgttttctcaaaagatgtatttacttgagaaaatacgtttcaacgttgatggacaaccaattaagaatcaagcacctttcgtaatcaatttaggcttatcgtctaaggtatactgatttacgacagttgactagacttataaggaacaaaataatagaatagtttctaaacacttcacctaatcatagagactaagatggtaattcgtaaacgacaaagcctagtgacactgtccattgtaaaattccacatcatattagtattaaacatatacatgtagtttcctgaacacatgtagtatcaaacacacttcgtggcttcttcctcgaaacctgcggccgcgctatagttccggacttacccttaagataacttcgtatagcatacattatacgaagttatgggcccacgcgtgaagagcggttaccagagctggtcacctttgtccaccaagatggaactgtcttcggccagaatggccatctggattcagcaggcctagaaggccatttatcgctatcaactttgtatagaaaagttgggccgaattcgagctcggtacggccagaatggcccggaccgaagcttgcggccgcacactgatagtttaaactgaaggcgggaaacgacaatctgatcatgagcggagaattaagggagtcacgttatgacccccgccgatgacgcgggacaagccgttttacgtttggaactgacagaaccgcaacgttgaaggagccactcagccgcgggtttctggagtttaatgagctaagcacatacgtcagaaaccattattgcgcgttcaaaagtcgcctaaggtcactatcagctagcaaatatttcttgtcaaaaatgctccactgacgttccataaattcccctcggtatccaattagagtctcatattcactctcccgggggatctcgactctagaggatcgctcaggaaggccgctgagatagaggcatggcggccaatgcgggcggcggtggagcgggaggaggcagcggcagcggcagcgtggctgcgccggcggtgtgccgccccagcggctcgcggtggacgccgacgccggagcagatcaggatgctgaaggagctctactacggctgcggcatccggtcgcccagctcggagcagatccagcgcatcaccgccatgctgcggcagcacggcaagatcgagggcaagaacgtcttctactggttccagaaccacaaggcccgcgagcgccagaagcgccgcctcaccagcctcgacgtcaacgtgcccgccgccggcgcggccgacgccaccaccagccaactcggcgtcctctcgctgtcgtcgccgccgccttcaggcgcggcgcctccctcgcccaccctcggcttctacgccgccggcaatggcggcggatcggctgtgctgctggacacgagttccgactggggcagcagcggcgctgccatggccaccgagacatgcttcctgcaggactacatgggcgtgacggacacgggcagctcgtcgcagtggccacgcttctcgtcgtcggacacgataatggcggcggccgcggcgcgggcggcgacgacgcgggcgcccgagacgctccctctcttcccgacctgcggcgacgacggcggcagcggtagcagcagctacttgccgttctggggtgccgcgtccacaactgccggcgccacttcttccgttgcgatccagcagcaacaccagctgcaggagcagtacagcttttacagcaacagcaacagcacccagctggccggcaccggcaaccaagacgtatcggcaacagcagcagcagccgccgccctggagctgagcctcagctcatggtgctccccttaccctgctgcagggagtatgtgagagcaacgcgagctgccactgctcttcactgatgtctctggaatggaaggaggaggaagtgagcatagcgttggtgcgttgctgtcaagggcgaattcacatggttaacctagacttgtccatcttctggattggccaacttaattaatgtatgaaataaaaggatgcacacatagtgacatgctaatcactataatgtgggcatcaaagttgtgtgttatgtgtaattactagttatctgaataaaagagaaagagatcatccatatttcttatcctaaatgaatgtcacgtgtctttataattctttgatgaaccagatgcatttcattaaccaaatccatatacatataaatattaatcatatataattaatatcaattgggttagcaaaacaaatctagtctaggtgtgttttgcgaatgcggccgccaccgcggtggagctcgaattccggtccgggcctagaaggccagcttcaagtttgtacaaaaaagcaggctccggccagaatggcccggaccgggttaccgaattcgagctcggtaccattattttccccccattttctcattttagaagcaacaatttactattacaatttctgttatcattttctatttttcatttacaaactgaggtcaaattcaggttttcaataaatgcatgataaccacatcatcaacaagagatgtgccattctttatttgtttattagttacttaactaatttaatactctttgttggttataaataggaagggtcctaatgaagtttcaaaggtttcaacaattctcctaacttcattataaatatatttatttatttatttatttattttatatatttttgtcacttctaccaattttgacctttagagtttataatacaaaacagtgttttgtaagtaaatacacgtttttgttgaacctaatagggtttttaccatcgagtatcagactatccacactcatataactctaaatttctaccatatgagaatatattgtacttgtcagcaaaaaactttacttataccacaattttccgtagtcatatctgctatatatctcaactctataccaaccgcaacatattatatcatttttgtctctttcctctcacctactcgcccaactcctcctggcttggtgacttctgtgcctgcacgtccaatgccatatggagaacatagaagagatggagtaagcctctccctaccacccataccttttagggtagatcgctacaacgtttcagttgctgcaaagaagacccaatatcatcaggtcgctcaatgcggatagcctcaatctatccacattcatcctactctaaaaagaatactccatcttagtcattaatattttaaaatacaatagagtcctacatctacaactattctatatctcaactcgatataactactacattttgatgaatatatatcgaacacatccggttaattgtgggcttgtggcgttgtgttcatgtcgccgccccacaaccacaagctcggcgggtcggcctcattgctgcatagcgttcgaacttcgaaccgtacaaacagtatctgaccgtttcctgtcggttgctgtaaagtagcgtcacgtatagagtagctgcagcacatttcgtacatacctcgagtagcgtagcgcaccctagtgtgtcactgtggacagcctcagggtctgtttggttgggctgtggctgtgaaaaaagttgctgtgggctgtgagctgtggaaaaagctgctgtaggctgtaagctgttaaaaagctaaaaaccgtttggtagaaaccactaaaagtcgttaaaaatccttcgatatatgttttcatagttccatccgaaaagccactaaaagcaggtccagaggtgctttcagatttgcactacaagaaaatcggtttttagaaaaagctgcttcctggatccagccctttggttggcttttggcttttaggggggcaaaagccaaagtcaaaagttaaaccaaacacaccctcagtcacccattcacatctctaccctagtgcgcttcccttataaaacctagctcctcaagctccagacgcagtcgaccgccgcagaccgggagtagtcgacgcgccgtcactgaatcctcagatcacggctagccgtaatcacgccactctgctgactcccggcgaggtactctgacgcatgcgcgagcgcttctcttcttctcttttcgctgtgcttttagtctgttcgtttgatgcccagatctactaggtttgtgtgatgagccgagccgatttatgcactggatttttagtcaagtgttgtttccgcctccgctatctttagtgtctatgtctgaatttgggttcagtgattatcgagctataaattatagttgttgcgctgttctatactagatccagttaccgatctatgatattacggggttgagcgattcatgtgctggagtactagtccaagatttgcttccgtctcctcatctacctttagtatgtactctgtatataaacttaattgcagtttgcaactgattctcggccatatattacttccgttgcgttgttcattagatccatttccgatccctgatattacgtgggtggggggtacttcgactttgttttttccggattgtttgattactggtctattcccatacatatttgtttctcattgattttatataattttgatgtaagcagcagtgtaacattttccttcagccccatggccactgtgaacaactggctcgctttctccctctccccgcaggagctgccgccctcccagacgacggactccacactcatctcggccgccaccgccgaccatgtctccggcgatgtctgcttcaacatcccccaagattggagcatgaggggatcagagctttcggcgctcgtcgcggagccgaagctggaggacttcctcggcggcatctccttctccgagcagcatcacaaggccaactgcaacatgatacccagcactagcagcacagtttgctacgcgagctcaggtgctagcaccggctaccatcaccagctgtaccaccagcccaccagctcagcgctccacttcgcggactccgtaatggtggcttcctcggccggtgtccacgacggcggtgccatgctcagcgcggccgccgctaacggtgtcgctggcgctgccagtgccaacggcggcggcatcgggctgtccatgattaagaactggctgcggagccaaccggcgcccatgcagccgagggtggcggcggctgagggcgcgcaggggctctctttgtccatgaacatggcggggacgacccaaggcgctgctggcatgccacttctcgctggagagcgcgcacgggcgcccgagagtgtatcgacgtcagcacagggtggagccgtcgtcgtcacggcgccgaaggaggatagcggtggcagcggtgttgccggcgctctagtagccgtgagcacggacacgggtggcagcggcggcgcgtcggctgacaacacggcaaggaagacggtggacacgttcgggcagcgcacgtcgatttaccgtggcgtgacaaggcatagatggactgggagatatgaggcacatctttgggataacagttgcagaagggaagggcaaactcgtaagggtcgtcaagtctatttaggtggctatgataaagaggagaaagctgctagggcttatgatcttgctgctctgaagtactggggtgccacaacaacaacaaattttccagtgagtaactacgaaaaggagctcgaggacatgaagcacatgacaaggcaggagtttgtagcgtctctgagaaggaagagcagtggtttctccagaggtgcatccatttacaggggagtgactaggcatcaccaacatggaagatggcaagcacggattggacgagttgcagggaacaaggatctttacttgggcaccttcagcacccaggaggaggcagcggaggcgtacgacatcgcggcgatcaagttccgcggcctcaacgccgtcaccaacttcgacatgagccgctacgacgtgaagagcatcctggacagcagcgccctccccatcggcagcgccgccaagcgcctcaaggaggccgaggccgcagcgtccgcgcagcaccaccacgccggcgtggtgagctacgacgtcggccgcatcgcctcgcagctcggcgacggcggagccctggcggcggcgtacggcgcgcactaccacggcgccgcctggccgaccatcgcgttccagccgggcgccgccagcacaggcctgtaccacccgtacgcgcagcagccaatgcgcggcggcgggtggtgcaagcaggagcaggaccacgcggtgatcgcggccgcgcacagcctgcaggacctccaccacctgaacctgggcgcggccggcgcgcacgactttttctcggcagggcagcaggccgccgccgctgcgatgcacggcctgggtagcatcgacagtgcgtcgctcgagcacagcaccggctccaactccgtcgtctacaacggcggggtcggcgacagcaacggcgccagcgccgtcggcggcagtggcggtggctacatgatgccgatgagcgctgccggagcaaccactacatcggcaatggtgagccacgagcaggtgcatgcacgggcctacgacgaagccaagcaggctgctcagatggggtacgagagctacctggtgaacgcggagaacaatggtggcggaaggatgtctgcatgggggactgtcgtgtctgcagccgcggcggcagcagcaagcagcaacgacaacatggccgccgacgtcgggcatggcggcgcgcagctcttcagtgtctggaacgacacttaagcgtacgtgccggcctggctctccgaaagggcgtattccagcacactggcggccgttactagacccaacctagacttgtccatcttctggattggccaacttaattaatgtatgaaataaaaggatgcacacatagtgacatgctaatcactataatgtgggcatcaaagttgtgtgttatgtgtaattactagttatctgaataaaagagaaagagatcatccatatttcttatcctaaatgaatgtcacgtgtctttataattctttgatgaaccagatgcatttcattaaccaaatccatatacatataaatattaatcatatataattaatatcaattgggttagcaaaacaaatctagtctaggtgtgttttgcgaatgcggcctccgggcacccagctttcttgtacaaagtggccgttaacggatcggccagaatggcccggaccgggttaccccgcggttcaaagccaatgactgttgttaggtccagtttctaaggacgaatcatccaatcactggttctttctgaacaaaacaaagagctatagagttacgttactgtagccgagacagagcctgcaatctggttatgccacatactaggttctttcttaaagttgactcactctatcctaagttctacttacaaggagctacaacaaattggtcataaccggagagcgttcaaggaggtaatatcccatcttactctgtagcaaggctacaaaaggagagctaaagaactaggctacaaaaagagagctaaagaactaactatctagcaagactacagagctatagtgtagagatttcataaccggtgagcgttcaaggatactttgaagagaagaggtaatatctcaactagcaagactacaaaaaaatggagatataaaactaactgtctaacaagactacagagctatagtagagatagatacgttcgacacttaagcatgagaattcgagctcggtaccctggttcacaaactcaatacaacacacagtggagtagggtattacgctccggcggcccgaaccactctaaatccttgtgtcctcgtgtgctcttccaccattaatgactgtaattgcagggacacgaagagttgtagcgcttttgccaacaagatccgctatatgctagtagagtggaacctgcacagcaacaagcatccaataatctgagaataagaattatgtgtggtgatggttctcatctctgcaactcgccattttcgcgagagaaccaaatccaagttggtgaagatcatgatttgggctcatgggctggcatagtagctattacctttgcaattgtggttcgaatctatccgatattctccttttcagggagagctaatgcttatgcttattgggtattttggtttgacactgcttcacgcccaaaaaaaggcaactatgtctgagttggatatggcccaaaaaaaggcagctatgtctgagttggatatggaagtcttctttcgtttagggtgaagtaagaccaagctcatgagcttattatcttaggtcggaacaaattagttgataggcatggcacatttatcaaattataatgattttaacagaaaagcaacacctctttttcagcagcaccagctttgcaagctgcaattgacactccaagcatagtatttgctccaaactcagcctgcatttcgcacaatatcatatctatttccatttggataaaatatattttccagaaatatgggaacagaatcaagatacagaaaaaagttgtggtagtagtggtaagtggaaacacaagtacagtgaaaagatagcattatttctgaacagtcaaattaaccgaaataagtagtatcacatactgcccctaaattgactacacccaatgtaaagaattgcttgagcatattgagccatcagttgtttgtttgtgtaacggatttgacaatgcagagttcaggagcaaaaaaccgcaaaggagagaaagagggaaaggatctcctagtatcccaccttgtggcgcgccctgtcaagtgcatgatggcctggtcgatctgcgtctgctgctgcggttccatcccaacgagtgcctccgacaccttgtcgttgatcacccgcaccgcgtaggcgacccccctggcgaggaacttccgcctctcggaggccccggccgcgtcggcggcggcgccctcgagcgcgcccacgctagccgtagatgctcggtgcacggccttgttggtgtgcaactcgacctcaacggccggtgcgctacgcccgtcaaggatctggcgcgcccgcaccctcgtgatcacggtgggcgcctcccgcctcatgtggccgacgatgaaaagcgccgggttaggggccttggcgcgcaccgccgtattcagggcctcctcgctcttgcgcgagagcaggtgcttccccaggtactcctgcactgacaaggctgccacagcggtggaatttgtcctcacgacttcgccacgtcgtcctcacctccctggcttcccacgactccgccgtatcgaggtgctcggtgggtcgtcttaatccgaagtccgaactaggaagacgagacagagaggtctgaggaatgggcctcgtttgatgttgagctgaattatttttccagcataagcccaggtcttggtccatgaacaaaattactagaaacccagcccagtactacgatctaaaagagggactgccactggatagctctctctagcattctccacgctccaatacagcggcgtcgtgtctatccgggtctatccgcgaacacgtgagaactctccagaaactgctttctcctccacttcatctctctcgctttccctctataaaaagaccccttctaggaattgagggagacagcaagcaccaagcagcgatccgaagctcaatcaattcactcaaacctcttccccaaatcttcgattagatcttcgttgacaagaagactagaaccgaacctgacatgtccaacctgctcacggttcaccagaaccttccggctcttccagtggacgcgacgtccgatgaagtcaggaagaacctcatggacatgttccgcgacaggcaagcgttcagcgagcacacctggaagatgctgctctccgtctgccgctcctgggctgcatggtgcaagctgaacaacaggaagtggttccccgctgagcccgaggacgtgagggattaccttctgtacctgcaagcgcgaggtttgtttctgcttctacctttgatatatatataataattatcattaattagtagtaatataatatttcaaatatttttttcaaaataaaagaatgtagtatatagcaattgcttttctgtagtttataagtgtgtatattttaatttataacttttctaatatatgaccaaaacatggtgatgcctaggtctggcagtgaagaccatccagcaacaccttggacaactgaacatgcttcacaggcgctccggcctcccgcgccccagcgactcgaacgccgtgagcctcgtcatgcgccgcatcaggaaggaaaacgtcgatgccggcgaaagggcaaagcaggccctcgcgttcgagaggaccgatttcgaccaggtccgcagcctgatggagaacagcgacaggtgccaggacattaggaacctggcgttcctcggaattgcatacaacacgctcctcaggatcgcggaaattgcccgcattcgcgtgaaggacattagccgcaccgacggcggcaggatgcttatccacattggcaggaccaagacgctcgtttccaccgcaggcgtcgaaaaggccctcagcctcggagtgaccaagctcgtcgaacgctggatctccgtgtccggcgtcgcggacgacccaaacaactacctcttctgccgcgtccgcaagaacggggtggctgcccctagcgccaccagccaactcagcacgagggccttggaaggtattttcgaggccacccaccgcctgatctacggcgcgaaggatgacagcggtcaacgctacctcgcatggtccgggcactccgcccgcgttggagctgctagggacatggcccgcgccggtgtttccatccccgaaatcatgcaggcgggtggatggacgaacgtgaacattgtcatgaactacattcgcaaccttgacagcgagacgggcgcaatggttcgcctcctggaagatggtgactgaggtacccaacctagacttgtccatcttctggattggccaacttaattaatgtatgaaataaaaggatgcacacatagtgacatgctaatcactataatgtgggcatcaaagttgtgtgttatgtgtaattactagttatctgaataaaagagaaagagatcatccatatttcttatcctaaatgaatgtcacgtgtctttataattctttgatgaaccagatgcatttcattaaccaaatccatatacatataaatattaatcatatataattaatatcaattgggttagcaaaacaaatctagtctaggtgtgttttgcgatccgatatcgaattggccacggtaccagctgctgctgttctagggttcacaagtctgcctatttgtcttccccaatggagctatggttgtctggtctggtccttggtcgtgtcccgtttcattgtgtactatttacctgtaatgtgtatccttaagtctggtttgatggtgtctgaaacgttttgctgtggtagagcagcatggaagaactataatgaataagtgatccctaatcattgtgtccaaattttgcttctgctatacccttttgtgctgtttcttatgttttgcttaaaaatttgatctgacaaacaaatttgtctaaattatgctcttgttctgactgtgtactgtacacatttgtattgctaccggtttggcacatagttttctctttgattgcagatcaaacccttctgattgcagattgcttggctatggctgatgtgctcactgttcttctttagcttgtatattgctgatggtggcttggctacggctgaaaaagttgctgctgcgccgacttggcaactgttgctccagtaatgctttgtcctctcttcctagccgccgacttggcacttggcagctgttgctcctgtaatgcgttgttatctcttatctcttgagatgtactatgattttgaggctgtttgacttgtgccagattgccagtgctgatgctatattatctcaggtttttatgctagtatatgttttactgtgtgctgcctgtgtcgagttacgtaatctattgaaccgctatgcgtgttgatgccctgttgttgcttgccagattgatgcccctgttgcttgcagcttgcaagctgtagtgaaatcctaaaattccaaaccaaatctattctgaacttttgaagatctgtgatgtccggaagaaaagattcaaacagataaacgggactctccagaatctataaaataaatgatcgacaaacgctttgctttggtaggcttcaagcttggtcacccggtccgggcctagaaggccagcttcggccgccccgggcaactttattatacaaagttgatagataaatcagatatctggttcctaaggacccggcggaccgattaaactgattcggtccgacgcgttacctaataacttcgtatagcatacattatacgaagttattagctaactaactagtaagcttaagccatgggtcgacggatccgttaactagcgtggcatttggcaccgccgcacactatgcgagctaggagtgctagtttacagatgaaactatgaaaccaagaaaacacaattgtccgtagctagcgcgtggcgtcgtgtcaagcttcacacagtatcttcgttcttcactataaatcgcgcctgttgttcgtgagacccaccaccgtggataacagtcccctaataataagcgatcaacagcactgctgatggctgaacaccgaggcgccgccgcgcgtaaccatccgccggagcagcccgtcgtgccggcgaacgacgccttccccgaccgcgcccagcagctctgcctcgacgccgggcgcgcgctcgcgatgtgcggcgtgctcgtcgccgtccctcccgcattttacgcgtcgacgtcgcggacgacaccgcacttgccttcgtcggcttcgtcctctggatcatcggtgcgtggctgtgcctcctggcgctcacgcccttggctccacgggcggtgagggcgggcggggccgccgccagcaccttgctgatcaggtgcctgtccctttcatgaactactagcgcccgcgcccgcggccgccgggcacaagagaacacatcgatgttcgctgcgtacgtcagcaataaggcactctttgtcagtagtcgagtgcatatgttgggtgtttgccctgggagatttcaagtgttgtggccattatcccgcaggataaaaaatcggcggcttttggattgatacggaaaataacgatgtttcatgctcgtgttgtgtgtgtgacatcttgtcagccaagtttttaaccgttgctactccccctctgtgggctcagtgtgtggaccggaatacgtcgtacataggccgtagcctaagcccaatatgccgtttttcaggttggcctgtgtgacgacaagcgggtctcaaaagcccatcacgcaactggcctgcaattattggaggagagcgcgtcgagttggttccagaggctgcgtggtggggccggactctgcgacgacctctcgttcgcgtccgatttggttgccgtgagccgtgacgtaacgcctccttccgttcctccctatataagttccacccccgggtccggtttccccaagccccagtgacccccgatcccgatcgcgaaatctccgcacccgccggcaagggaccgaagcaagcctctctcccgaccgtcgcatcaaggtacgcgtccgctcgatctgtcctcttccttctcgatttgacttgctgtggtgcccgatcacgggatcagaatcgcaccagtgtagatttcgcatgttctaagatgtgttagtttccaggctaatccagttctcttgacgcccgatccgatcgagctccgtgtttatttcagcctaatcgtagtattcccctaaaatttcctcattagggggttcgcaagattgttggtcgacaggttcacttatgctcgatcgcttacttttagtcgattcatgctgcgtactattgttgccccccgtggttttatcttttctcgtgtgaaatccagtagatatagtagatatcgtagcattaggttttaattcaatcgattgattattgtatcatcaaaattgagaagttcgaatcatgcctatcatgctgcctcaaccgaaatcctgtatattgaagtttcaattcaattgattgatcattcattagattcaaccaaaatctagaaggttagatgacgcatgtcatgctgcctgcgtagtttacctttgatctgtttatgattaccttatcagtaggatatttgtgattttgggaagtagcactaactgattcatgctgacatgatgttccctttcagattatactgttgagtcctatctaattgatgctttgtatgctatatgaatacgtcatggtaaattagcagttaattagcatattagcaattgggcgtacctcatcaggattgctcttgtagatgtgtgtggtgatgtttcttgttcaattcatgttctgctttaaaagtatgtgttctctgtttgttaattaagattcatggttataatgatttggacctaattaatcagggttgcccttttagatgcgtggttacttgttgagttcatttttttcctgctatagttgtatgcgtttgttcattcatggttagatttgatttgtttcttctctattccatgccttccatatacttcaattgtagcttaacatgagatttctgtatatgcaggtcgaccgccggggatccacacgacaccatggcccagtccaagcacggcctgaccaaggagatgaccatgaagtaccgcatggagggctgcgtggacggccacaagttcgtgatcaccggcgagggcatcggctaccccttcaagggcaagcaggccatcaacctgtgcgtggtggagggcggccccttgcccttcgccgaggacatcttgtccgccgccttcatgtacggcaaccgcgtgttcaccgagtacccccaggacatcgtcgactacttcaagaactcctgccccgccggctacacctgggaccgctccttcctgttcgaggacggcgccgtgtgcatctgcaacgccgacatcaccgtgagcgtggaggagaactgcatgtaccacgagtccaagttctacggcgtgaacttccccgccgacggccccgtgatgaagaagatgaccgacaactgggagccctcctgcgagaagatcatccccgtgcccaagcagggcatcttgaagggcgacgtgagcatgtacctgctgctgaaggacggtggccgcttgcgctgccagttcgacaccgtgtacaaggccaagtccgtgccccgcaagatgcccgactggcacttcatccagcacaagctgacccgcgaggaccgcagcgacgccaagaaccagaagtggcacctgaccgagcacgccatcgcctccggctccgccttgccctccggactcagatctcgatagagtcaacctagacttgtccatcttctggattggccaacttaattaatgtatgaaataaaaggatgcacacatagtgacatgctaatcactataatgtgggcatcaaagttgtgtgttatgtgtaattactagttatctgaataaaagagaaagagatcatccatatttcttatcctaaatgaatgtcacgtgtctttataattctttgatgaaccagatgcatttcattaaccaaatccatatacatataaatattaatcatatataattaatatcaattgggttagcaaaacaaatctagtctaggtgtgttttgcgaattgcggcgcccttactttaacgcctctaaccaacacccctttatctttataaggaacaataaacagaatttgccccactgttctaaatcacctaataatatccccagctaaaaacaataaaggtttcctagaattaagacaagcatgactgttcctccaggagggtttggaacattgttgcagtcttgcagatacgggcgaagggtgagaaacagagcggagggctggaggtgacctcggtagtcgacgccggagttgagcttgacaacgacggggcggcccctgatggacttgaggaagtccgatggcgtcttcaccgtcccgccggcgcccgaggcgggcctgtcgctgccgccgccgccgctgctcatcttgcgcgctgtgcccccggcggtgtccctgtgttgcggatcgcgggtgggccaggtggatgcgagggcgacccgtttggactccggccggagccgccggatccctggtcggtgtcagtgccgtttactctgggccccacgtgtcagtaccgtctgtagatgacaacaacccgtcgtccacagtcatgtccaaaatatcctttcttcttttttttcgattcggatatctatcttccttttttttttccaaaaatcttcttgacgcaccagcgcgcacgtttgtggtaaacgccgacacgtcggtcccacgtcgatagaccccacccaccagtgagtagcgtgtacgtattcgggggtgacggacgtgtcgccgtcgtcttgctagtcccattcccatctgagccacacatctctgaacaaaaaaaaggagggaggcctccacgcacatccccctccgtgccacccgccccaaaccctcgcgccgcctccgagacagccgccgcaaccatggccaccgccgccgccgcgtctaccgcgctcactggcgccactaccgctgcgcccaaggcgaggcgccgggcgcacctcctggccacccgccgcgccctcgccgcgcccatcaggtgctcagcggcgtcacccgccatgccgatggctcccccggccaccccgctccggccgtggggccccaccgagccccgcaagggtgctgacatcctcgtcgagtccctcgagcgctgcggcgtccgcgacgtcttcgcctaccccggcggcgcgtccatggagatccaccaggcactcacccgctcccccgtcatcgccaaccacctcttccgccacgagcaaggggaggcctttgccgcctccggctacgcgcgctcctcgggccgcgtcggcgtctgcatcgccacctccggccccggcgccaccaacctagtctccgcgctcgccgacgcgctgctcgattccgtccccatggtcgccatcacgggacaggtggcgcgacgcatgattggcaccgacgccttccaggagacgcccatcgtcgaggtcacccgctccatcaccaagcacaactacctggtcctcgacgtcgacgacatcccccgcgtcgtgcaggaggctttcttcctcgcctcctctggtcgaccagggccggtgcttgtcgacatccccaaggacatccagcagcagatggcggtgcctgtctgggacaagcccatgagtctgcctgggtacattgcgcgccttcccaagccccctgcgactgagttgcttgagcaggtgctgcgtcttgttggtgaatcgcggcgccctgttctttatgtgggcggtggctgcgcagcatctggtgaggagttgcgacgctttgtggagctgactggaatcccggtcacaactactcttatgggcctcggcaacttccccagcgacgacccactgtctctgcgcatgctaggtatgcatgggacggtgtatgcaaattatgcagtggataaggccgatctgttgcttgcacttggtgtgcggtttgatgatcgcgtgacagggaagattgaggcttttgcaagcagggctaagattgtgcacgttgatattgatccggctgagattggcaagaacaagcagccacatgtgtccatctgtgcagatgttaagcttgctttgcagggcatgaatgctcttcttgaaggaagcacatcaaagaagagctttgactttggctcatggaacgatgagttggatcagcagaagagggaattcccccttgggtataaaacatctaatgaggagatccagccacaatatgctattcaggttcttgatgagctgacgaaaggcgaggccatcatcggcacaggtgttgggcagcaccagatgtgggcggcacagtactacacttacaagcggccaaggcagtggttgtcttcagctggtcttggggctatgggatttggtttgccggctgctgctggtgcttctgtggcaaacccaggtgtcactgttgttgacatcgatggagatggtagctttctcatgaacgttcaggagctagctatgatccgaattgagaacctcccagtgaaggtctttgtgctaaacaaccagcacctggggatggtggtgcagttggaggacaggttctataaggccaacagagcgcacacatacttgggaaacccagagaatgaaagtgagatatatccagatttcgtgacgatcgccaaagggttcaacattccagcggtccgtgtgacaaagaagaacgaagtccgcgcagcgataaagaagatgctcgagactccagggccgtacctcttggatataatcgtcccacaccaggagcatgtgttgcctatgatccctagtggtggggctttcaaggatatgatcctggatggtgatggcaggactgtgtactgactagctagtcagttaacagatctgccagatcctcggtgtacaaataacccgtcttatcctatgagacgggccggcgtcagtgtgttctggaggaatttttatgtcagagcctttttctttgtgtgcttgatgtagatgccaagggaagcttattggctgttgaagcttgatgcaaaataaattatggaactctgttttttgtttatctaataataactagcaaatatgcttccattgcattgaaactaacagccttttgtgtttccaagttttattttgtgacaatgtcatctatttcaattagttgtggaatcggaaacttgcaggactaacttggaaactccaatccctcagcatcctggactttttcctggtgtaatccatgtagatattattttaatcatcattttagttctggaggtttttccatctccggttttgctcccctttcttcaaaaaaaaaaaaaaaatgccgtaggcgccgcaacgcccacctgttgttcaaactcatgggcacgagtggctcgaagattttatacaacaattgctgtagtttcaccgttgctggtgaagaagcatttttttaaaaaaatatagtggtattcattttaattagtttagttgtgcagcgagcaaaatttggacatgctctgctcggaatctgatcgacctagacacagattagcagcagtagctttgtcatctgttccaagagttgcgatctgatagaagaaaaaaaaaccttcccttcaatgtaaaaccgaaactaacaagaaagaagcacagtgccgtttaggcaagtatggagtacgtattaagcatgtagaaggccatgcatgaaccactaacaagaaagaagcgcagtgccattcaggcaagcataagcatgtagattggcatgcatgaacaactaacagtagatcgtctctggtctgattagaagttttttgggaagccaagaaatcatgtacaactggttccatctcaaattccgtggcaaaaagaggcctaagcaacatacctcgagtagatcacattcaagcttggtcacccggtccgtcaatattctgattccgatgacttcgtaggttcctagctcaagccgctcgtgtccaagcgtcacttacgattagctaatgattacggcatctaggaccgactagtggcgcgccgactagctagctaaggtaccgagctcgaattcattccgattaatcgtggcctcttgctcttcaggatgaagagctatgtttaaacgtgcaagcgctactagacaattcagtacattaaaaacgtccgcaatgtgttattaagttgtctaagcgtcaatttgtttacaccacaatatatcctgcca

SEQ ID NO: 269 - DNA, 21008 bp, Artificial Sequence
  PHP100011
gtttacccgccaatatatcctgtcaaacactgcggccgcacttgaccgcggatggagccggagctgtggtgaggccatcgacgggaggtgggggagaacacagtctcagtgttctttgtgagtccgcaaggtttttagcttttctgtattaattaaggttgctgttggctgtagaatacggtcgtggaagagctgtatcggtagctactacgtaagctattatatactggaagtctggagctcgtcgatctccggtcgtcttcctccatttctcctcgtcttgctttgactgctgctaccatttgcttctgttttctgatgaagcatgccatgtcggccaccagtgtttgtgtggtttttgcagggaatggctttcaagtgctgtgattgaatggccctcgtcgtcctcggctgagctcacatggacgcgtcatgtgagtgagatatatgatcatatgatgagtggggttcgggtgagtgcgtacttgaagtaggatcccgctttcactcattcattcattggcctttaaaccgggaaattttcgcgaggagatggagggaagcaagcagggtgacgagtgcagagtgccgcgagcgctttgtcaaaaggcaccgccgtaggcaaaaaaatcaatggccctgactgactcgatggtagtactactgtagagactagagagggttgctccccatatcttcgtgtgacttttactccagcattgcatttccgtcattgagacgttaattaatagcagctttcgggacagatgactgtggccatgtttcgtcacggccgcttcgtgccagctgggggtactatagtactgtgattttgttagtaaaaactttcattaggccaccattgacgaccgggccttcgcttttgctgcgctaattaaccatttcccggcgaccgaagggaacatgaacatgccccgacacatgagggcatgaggactagtgttctccctgtcgttcgttgacttgactagtgatagtttaaacgctcttcaactggaagagcggttactaccggttcactagctagctgctaatcgagctagttaccctatgaggtgacatgaagcgctcacggttactatgacggttagcttcacgactgttggtggcagtagcgtacgacttagctatagttccggacttacccttaagataacttcgtatagcatacattatacgaagttatgggcccacgcgtgaagagcggttaccagagctggtcacctttgtccaccaagatggaactgtcttcggccagaatggccatctggattcagcaggcctagaaggccatttatcgctatcaactttgtatagaaaagttgggccgaattcgagctcggtacggccagaatggcccggaccgaagcttgcggccgcacactgatagtttaaactgaaggcgggaaacgacaatctgatcatgagcggagaattaagggagtcacgttatgacccccgccgatgacgcgggacaagccgttttacgtttggaactgacagaaccgcaacgttgaaggagccactcagccgcgggtttctggagtttaatgagctaagcacatacgtcagaaaccattattgcgcgttcaaaagtcgcctaaggtcactatcagctagcaaatatttcttgtcaaaaatgctccactgacgttccataaattcccctcggtatccaattagagtctcatattcactctcccgggggatctcgactctagaggatcgctcaggaaggccgctgagatagaggcatggcggccaatgcgggcggcggtggagcgggaggaggcagcggcagcggcagcgtggctgcgccggcggtgtgccgccccagcggctcgcggtggacgccgacgccggagcagatcaggatgctgaaggagctctactacggctgcggcatccggtcgcccagctcggagcagatccagcgcatcaccgccatgctgcggcagcacggcaagatcgagggcaagaacgtcttctactggttccagaaccacaaggcccgcgagcgccagaagcgccgcctcaccagcctcgacgtcaacgtgcccgccgccggcgcggccgacgccaccaccagccaactcggcgtcctctcgctgtcgtcgccgccgccttcaggcgcggcgcctccctcgcccaccctcggcttctacgccgccggcaatggcggcggatcggctgtgctgctggacacgagttccgactggggcagcagcggcgctgccatggccaccgagacatgcttcctgcaggactacatgggcgtgacggacacgggcagctcgtcgcagtggccacgcttctcgtcgtcggacacgataatggcggcggccgcggcgcgggcggcgacgacgcgggcgcccgagacgctccctctcttcccgacctgcggcgacgacggcggcagcggtagcagcagctacttgccgttctggggtgccgcgtccacaactgccggcgccacttcttccgttgcgatccagcagcaacaccagctgcaggagcagtacagcttttacagcaacagcaacagcacccagctggccggcaccggcaaccaagacgtatcggcaacagcagcagcagccgccgccctggagctgagcctcagctcatggtgctccccttaccctgctgcagggagtatgtgagagcaacgcgagctgccactgctcttcactgatgtctctggaatggaaggaggaggaagtgagcatagcgttggtgcgttgctgtcaagggcgaattcacatggttaacctagacttgtccatcttctggattggccaacttaattaatgtatgaaataaaaggatgcacacatagtgacatgctaatcactataatgtgggcatcaaagttgtgtgttatgtgtaattactagttatctgaataaaagagaaagagatcatccatatttcttatcctaaatgaatgtcacgtgtctttataattctttgatgaaccagatgcatttcattaaccaaatccatatacatataaatattaatcatatataattaatatcaattgggttagcaaaacaaatctagtctaggtgtgttttgcgaatgcggccgccaccgcggtggagctcgaattccggtccgggcctagaaggccagcttcaagtttgtacaaaaaagcaggctccggccagaatggcccggaccgtcactgactagctaaacagcggccgcatcgagcagctggcttgtggggaccagacaaaaaaggaatggtgcagaattgttaggcgcacctaccaaaagcatctttgcctttattgcaaagataaagcagattcctctagtacaagtggggaacaaaataacgtggaaaagagctgtcctgacagcccactcactaatgcgtatgacgaacgcagtgacgaccacaaaactcgagcaacgagatcatgagccaatcaaagaggagtgatgtagacctaaagcaataatggagccatgacgtaagggcttacgcccatacgaaataattaaaggctgatgtgacctgtcggtctctcagaacctttactttttatgtttggcgtgtatttttaaatttccacggcaatgacgatgtgaccgtcgacccactaaaacattgctttgtcaaaagctaaaaaagatgatgcccgacagccacttgtgtgaagcatgagaagccggtccctccactaagaaaattagtgaagcatcttccagtggtccctccactcacagctcaatcagtgagcaacaggacgaaggaaatgacgtaagccatgacgtctaatcccagggcccggtgaccaatcgaattagcttggcgcgtggaccgaagcttgcatgcctgcaatttaaattataatcagtacgaactatctgacaactatccggtacctatccgagtagtatctgttatccgtttcttacccgcccgggttattacccggtcccgtcttgtatccattccgaatcttaactacccgtatccggcctcgtatccgagacacatgcattagagtagaatacatgatgactcggtatccggctgtatctgtcccgttttcatccctagttatcctaccaaatttgagaaaatgactcatgatgcattatctcattttagatggagtgatttctcaaacaaacacccccttagatagtcaaagtgactattcaagtttcctcttccgggttactctattgttcgtcaaaatgactattcaaaccaaacactctctaaatgtaacaagtgactggataggctatagccgagggtgttcgtctagtagagggtttgtttggaattcgttttttttgtatttccgtgttttcctgcgaaattaaattggttcatataaaattcctacatggcttctaagaagctattatattttgaatcggtcttagctccaaaggagcaaaccctatttctccacctagcattacctcgtcctagctcttgaaatgctcaagtagtcaagtgtttacatgtagtgcagtcaatgtcaaggtaacgcaataaactaaggccatgttcattccacctaggattatataattcagcttatagattatataatcaccaaataacctatttatggattattatagatatctaaattatataatccacataataatgcgtgttgtttattttcctcttaacttatttaagttggattatataatcttgagggtaaataaacatggcctaaatttactacaacatggatagtagttagagacatttgtttttaaaccatgaaaaaaccctataaacttctaaaaagttctgctaaaattctaaatacaaattaatatacaacttcaaaaaaatgttcaaaggtcatatctccagcacttctaaaaatcatttatttagaaaaataaaaaacatagaaaaattacaaatcattctaattgatgccgtaatgtgtttcaaaaactttctacaacaaaagcttaaacacaaccatcaaaaatgtatgagacattaatgtatttcacgctattgactattgcatatatttgtcgtgtaaagttttatagcccatttatacatcaattataatgattttaatttttctagatttcttttgtacaattttctatttttctatagctaaataattttaacaaaatttctagtgatatttctattttttttatttttgtacacctagatttgtagaaagttagagacattgtttatagtttaaaaattgaaaaaatatttactgtatttttactaacgggtgaagtcgcatccaaaaccacttcagtccatggcaagaggtattttactaacggacggacatggcccagacatccggaagaggcccaagggcccataacgtccgtacccgcatccgacggttccaagcctaacacgcgtcatccatcgggagctcgctctagggttttgcttcgagaccgttcccacttcccatcgctcatataacaccgggcgccgccgcttccgtcctcttcctctcgctccgttgctcgcctcgggtcaaaccctaagcaggtacgcttccttgtgcgacggccatctcctcttgcggacggctcgatttctcaatctgttgtctatttcactgtatctgacctttctttgttttatttttgttgttgtttcttccacagggagttgatttatccgctgcagccggatccatggccactgtgaacaactggctcgctttctccctctccccgcaggagctgccgccctcccagacgacggactccacactcatctcggccgccaccgccgaccatgtctccggcgatgtctgcttcaacatcccccaagattggagcatgaggggatcagagctttcggcgctcgtcgcggagccgaagctggaggacttcctcggcggcatctccttctccgagcagcatcacaaggccaactgcaacatgatacccagcactagcagcacagtttgctacgcgagctcaggtgctagcaccggctaccatcaccagctgtaccaccagcccaccagctcagcgctccacttcgcggactccgtaatggtggcttcctcggccggtgtccacgacggcggtgccatgctcagcgcggccgccgctaacggtgtcgctggcgctgccagtgccaacggcggcggcatcgggctgtccatgattaagaactggctgcggagccaaccggcgcccatgcagccgagggtggcggcggctgagggcgcgcaggggctctctttgtccatgaacatggcggggacgacccaaggcgctgctggcatgccacttctcgctggagagcgcgcacgggcgcccgagagtgtatcgacgtcagcacagggtggagccgtcgtcgtcacggcgccgaaggaggatagcggtggcagcggtgttgccggcgctctagtagccgtgagcacggacacgggtggcagcggcggcgcgtcggctgacaacacggcaaggaagacggtggacacgttcgggcagcgcacgtcgatttaccgtggcgtgacaaggcatagatggactgggagatatgaggcacatctttgggataacagttgcagaagggaagggcaaactcgtaagggtcgtcaagtctatttaggtggctatgataaagaggagaaagctgctagggcttatgatcttgctgctctgaagtactggggtgccacaacaacaacaaattttccagtgagtaactacgaaaaggagctcgaggacatgaagcacatgacaaggcaggagtttgtagcgtctctgagaaggaagagcagtggtttctccagaggtgcatccatttacaggggagtgactaggcatcaccaacatggaagatggcaagcacggattggacgagttgcagggaacaaggatctttacttgggcaccttcagcacccaggaggaggcagcggaggcgtacgacatcgcggcgatcaagttccgcggcctcaacgccgtcaccaacttcgacatgagccgctacgacgtgaagagcatcctggacagcagcgccctccccatcggcagcgccgccaagcgcctcaaggaggccgaggccgcagcgtccgcgcagcaccaccacgccggcgtggtgagctacgacgtcggccgcatcgcctcgcagctcggcgacggcggagccctggcggcggcgtacggcgcgcactaccacggcgccgcctggccgaccatcgcgttccagccgggcgccgccagcacaggcctgtaccacccgtacgcgcagcagccaatgcgcggcggcgggtggtgcaagcaggagcaggaccacgcggtgatcgcggccgcgcacagcctgcaggacctccaccacctgaacctgggcgcggccggcgcgcacgactttttctcggcagggcagcaggccgccgccgctgcgatgcacggcctgggtagcatcgacagtgcgtcgctcgagcacagcaccggctccaactccgtcgtctacaacggcggggtcggcgacagcaacggcgccagcgccgtcggcggcagtggcggtggctacatgatgccgatgagcgctgccggagcaaccactacatcggcaatggtgagccacgagcaggtgcatgcacgggcctacgacgaagccaagcaggctgctcagatggggtacgagagctacctggtgaacgcggagaacaatggtggcggaaggatgtctgcatgggggactgtcgtgtctgcagccgcggcggcagcagcaagcagcaacgacaacatggccgccgacgtcgggcatggcggcgcgcagctcttcagtgtctggaacgacacttaagcgtacgtgccggcctggctctccgaaagggcgtattccagcacactggcggccgttactagacccaacctagacttgtccatcttctggattggccaacttaattaatgtatgaaataaaaggatgcacacatagtgacatgctaatcactataatgtgggcatcaaagttgtgtgttatgtgtaattactagttatctgaataaaagagaaagagatcatccatatttcttatcctaaatgaatgtcacgtgtctttataattctttgatgaaccagatgcatttcattaaccaaatccatatacatataaatattaatcatatataattaatatcaattgggttagcaaaacaaatctagtctaggtgtgttttgcgaatgcggcctccgggcacccagctttcttgtacaaagtggccgttaacggatcggccagaatggcccggaccgggttaccccgcggttcaaagccaatgactgttgttaggtccagtttctaaggacgaatcatccaatcactggttctttctgaacaaaacaaagagctatagagttacgttactgtagccgagacagagcctgcaatctggttatgccacatactaggttctttcttaaagttgactcactctatcctaagttctacttacaaggagctacaacaaattggtcataaccggagagcgttcaaggaggtaatatcccatcttactctgtagcaaggctacaaaaggagagctaaagaactaggctacaaaaagagagctaaagaactaactatctagcaagactacagagctatagtgtagagatttcataaccggtgagcgttcaaggatactttgaagagaagaggtaatatctcaactagcaagactacaaaaaaatggagatataaaactaactgtctaacaagactacagagctatagtagagatagatacgttcgacacttaagcatgagaattcgagctcggtaccctggttcacaaactcaatacaacacacagtggagtagggtattacgctccggcggcccgaaccactctaaatccttgtgtcctcgtgtgctcttccaccattaatgactgtaattgcagggacacgaagagttgtagcgcttttgccaacaagatccgctatatgctagtagagtggaacctgcacagcaacaagcatccaataatctgagaataagaattatgtgtggtgatggttctcatctctgcaactcgccattttcgcgagagaaccaaatccaagttggtgaagatcatgatttgggctcatgggctggcatagtagctattacctttgcaattgtggttcgaatctatccgatattctccttttcagggagagctaatgcttatgcttattgggtattttggtttgacactgcttcacgcccaaaaaaaggcaactatgtctgagttggatatggcccaaaaaaaggcagctatgtctgagttggatatggaagtcttctttcgtttagggtgaagtaagaccaagctcatgagcttattatcttaggtcggaacaaattagttgataggcatggcacatttatcaaattataatgattttaacagaaaagcaacacctctttttcagcagcaccagctttgcaagctgcaattgacactccaagcatagtatttgctccaaactcagcctgcatttcgcacaatatcatatctatttccatttggataaaatatattttccagaaatatgggaacagaatcaagatacagaaaaaagttgtggtagtagtggtaagtggaaacacaagtacagtgaaaagatagcattatttctgaacagtcaaattaaccgaaataagtagtatcacatactgcccctaaattgactacacccaatgtaaagaattgcttgagcatattgagccatcagttgtttgtttgtgtaacggatttgacaatgcagagttcaggagcaaaaaaccgcaaaggagagaaagagggaaaggatctcctagtatcccaccttgtggcgcgccctgtcaagtgcatgatggcctggtcgatctgcgtctgctgctgcggttccatcccaacgagtgcctccgacaccttgtcgttgatcacccgcaccgcgtaggcgacccccctggcgaggaacttccgcctctcggaggccccggccgcgtcggcggcggcgccctcgagcgcgcccacgctagccgtagatgctcggtgcacggccttgttggtgtgcaactcgacctcaacggccggtgcgctacgcccgtcaaggatctggcgcgcccgcaccctcgtgatcacggtgggcgcctcccgcctcatgtggccgacgatgaaaagcgccgggttaggggccttggcgcgcaccgccgtattcagggcctcctcgctcttgcgcgagagcaggtgcttccccaggtactcctgcactgacaaggctgccacagcggtggaatttgtcctcacgacttcgccacgtcgtcctcacctccctggcttcccacgactccgccgtatcgaggtgctcggtgggtcgtcttaatccgaagtccgaactaggaagacgagacagagaggtctgaggaatgggcctcgtttgatgttgagctgaattatttttccagcataagcccaggtcttggtccatgaacaaaattactagaaacccagcccagtactacgatctaaaagagggactgccactggatagctctctctagcattctccacgctccaatacagcggcgtcgtgtctatccgggtctatccgcgaacacgtgagaactctccagaaactgctttctcctccacttcatctctctcgctttccctctataaaaagaccccttctaggaattgagggagacagcaagcaccaagcagcgatccgaagctcaatcaattcactcaaacctcttccccaaatcttcgattagatcttcgttgacaagaagactagaaccgaacctgacatgtccaacctgctcacggttcaccagaaccttccggctcttccagtggacgcgacgtccgatgaagtcaggaagaacctcatggacatgttccgcgacaggcaagcgttcagcgagcacacctggaagatgctgctctccgtctgccgctcctgggctgcatggtgcaagctgaacaacaggaagtggttccccgctgagcccgaggacgtgagggattaccttctgtacctgcaagcgcgaggtttgtttctgcttctacctttgatatatatataataattatcattaattagtagtaatataatatttcaaatatttttttcaaaataaaagaatgtagtatatagcaattgcttttctgtagtttataagtgtgtatattttaatttataacttttctaatatatgaccaaaacatggtgatgcctaggtctggcagtgaagaccatccagcaacaccttggacaactgaacatgcttcacaggcgctccggcctcccgcgccccagcgactcgaacgccgtgagcctcgtcatgcgccgcatcaggaaggaaaacgtcgatgccggcgaaagggcaaagcaggccctcgcgttcgagaggaccgatttcgaccaggtccgcagcctgatggagaacagcgacaggtgccaggacattaggaacctggcgttcctcggaattgcatacaacacgctcctcaggatcgcggaaattgcccgcattcgcgtgaaggacattagccgcaccgacggcggcaggatgcttatccacattggcaggaccaagacgctcgtttccaccgcaggcgtcgaaaaggccctcagcctcggagtgaccaagctcgtcgaacgctggatctccgtgtccggcgtcgcggacgacccaaacaactacctcttctgccgcgtccgcaagaacggggtggctgcccctagcgccaccagccaactcagcacgagggccttggaaggtattttcgaggccacccaccgcctgatctacggcgcgaaggatgacagcggtcaacgctacctcgcatggtccgggcactccgcccgcgttggagctgctagggacatggcccgcgccggtgtttccatccccgaaatcatgcaggcgggtggatggacgaacgtgaacattgtcatgaactacattcgcaaccttgacagcgagacgggcgcaatggttcgcctcctggaagatggtgactgaggtacccaacctagacttgtccatcttctggattggccaacttaattaatgtatgaaataaaaggatgcacacatagtgacatgctaatcactataatgtgggcatcaaagttgtgtgttatgtgtaattactagttatctgaataaaagagaaagagatcatccatatttcttatcctaaatgaatgtcacgtgtctttataattctttgatgaaccagatgcatttcattaaccaaatccatatacatataaatattaatcatatataattaatatcaattgggttagcaaaacaaatctagtctaggtgtgttttgcgatccgatatcgaattggccacggtaccagctgctgctgttctagggttcacaagtctgcctatttgtcttccccaatggagctatggttgtctggtctggtccttggtcgtgtcccgtttcattgtgtactatttacctgtaatgtgtatccttaagtctggtttgatggtgtctgaaacgttttgctgtggtagagcagcatggaagaactataatgaataagtgatccctaatcattgtgtccaaattttgcttctgctatacccttttgtgctgtttcttatgttttgcttaaaaatttgatctgacaaacaaatttgtctaaattatgctcttgttctgactgtgtactgtacacatttgtattgctaccggtttggcacatagttttctctttgattgcagatcaaacccttctgattgcagattgcttggctatggctgatgtgctcactgttcttctttagcttgtatattgctgatggtggcttggctacggctgaaaaagttgctgctgcgccgacttggcaactgttgctccagtaatgctttgtcctctcttcctagccgccgacttggcacttggcagctgttgctcctgtaatgcgttgttatctcttatctcttgagatgtactatgattttgaggctgtttgacttgtgccagattgccagtgctgatgctatattatctcaggtttttatgctagtatatgttttactgtgtgctgcctgtgtcgagttacgtaatctattgaaccgctatgcgtgttgatgccctgttgttgcttgccagattgatgcccctgttgcttgcagcttgcaagctgtagtgaaatcctaaaattccaaaccaaatctattctgaacttttgaagatctgtgatgtccggaagaaaagattcaaacagataaacgggactctccagaatctataaaataaatgatcgacaaacgctttgctttggtaggcttcaagcttggtcacccggtccgggcctagaaggccagcttcggccgccccgggcaactttattatacaaagttgatagataaatcagatatctggttcctaaggacccggcggaccgattaaactgattcggtccgacgcgttacctaataacttcgtatagcatacattatacgaagttattagctaactaactagtaagcttaagccatgggtcgacggatccgttaactagcgtggcatttggcaccgccgcacactatgcgagctaggagtgctagtttacagatgaaactatgaaaccaagaaaacacaattgtccgtagctagcgcgtggcgtcgtgtcaagcttcacacagtatcttcgttcttcactataaatcgcgcctgttgttcgtgagacccaccaccgtggataacagtcccctaataataagcgatcaacagcactgctgatggctgaacaccgaggcgccgccgcgcgtaaccatccgccggagcagcccgtcgtgccggcgaacgacgccttccccgaccgcgcccagcagctctgcctcgacgccgggcgcgcgctcgcgatgtgcggcgtgctcgtcgccgtccctcccgcattttacgcgtcgacgtcgcggacgacaccgcacttgccttcgtcggcttcgtcctctggatcatcggtgcgtggctgtgcctcctggcgctcacgcccttggctccacgggcggtgagggcgggcggggccgccgccagcaccttgctgatcaggtgcctgtccctttcatgaactactagcgcccgcgcccgcggccgccgggcacaagagaacacatcgatgttcgctgcgtacgtcagcaataaggcactctttgtcagtagtcgagtgcatatgttgggtgtttgccctgggagatttcaagtgttgtggccattatcccgcaggataaaaaatcggcggcttttggattgatacggaaaataacgatgtttcatgctcgtgttgtgtgtgtgacatcttgtcagccaagtttttaaccgttgctactccccctctgtgggctcagtgtgtggaccggaatacgtcgtacataggccgtagcctaagcccaatatgccgtttttcaggttggcctgtgtgacgacaagcgggtctcaaaagcccatcacgcaactggcctgcaattattggaggagagcgcgtcgagttggttccagaggctgcgtggtggggccggactctgcgacgacctctcgttcgcgtccgatttggttgccgtgagccgtgacgtaacgcctccttccgttcctccctatataagttccacccccgggtccggtttccccaagccccagtgacccccgatcccgatcgcgaaatctccgcacccgccggcaagggaccgaagcaagcctctctcccgaccgtcgcatcaaggtacgcgtccgctcgatctgtcctcttccttctcgatttgacttgctgtggtgcccgatcacgggatcagaatcgcaccagtgtagatttcgcatgttctaagatgtgttagtttccaggctaatccagttctcttgacgcccgatccgatcgagctccgtgtttatttcagcctaatcgtagtattcccctaaaatttcctcattagggggttcgcaagattgttggtcgacaggttcacttatgctcgatcgcttacttttagtcgattcatgctgcgtactattgttgccccccgtggttttatcttttctcgtgtgaaatccagtagatatagtagatatcgtagcattaggttttaattcaatcgattgattattgtatcatcaaaattgagaagttcgaatcatgcctatcatgctgcctcaaccgaaatcctgtatattgaagtttcaattcaattgattgatcattcattagattcaaccaaaatctagaaggttagatgacgcatgtcatgctgcctgcgtagtttacctttgatctgtttatgattaccttatcagtaggatatttgtgattttgggaagtagcactaactgattcatgctgacatgatgttccctttcagattatactgttgagtcctatctaattgatgctttgtatgctatatgaatacgtcatggtaaattagcagttaattagcatattagcaattgggcgtacctcatcaggattgctcttgtagatgtgtgtggtgatgtttcttgttcaattcatgttctgctttaaaagtatgtgttctctgtttgttaattaagattcatggttataatgatttggacctaattaatcagggttgcccttttagatgcgtggttacttgttgagttcatttttttcctgctatagttgtatgcgtttgttcattcatggttagatttgatttgtttcttctctattccatgccttccatatacttcaattgtagcttaacatgagatttctgtatatgcaggtcgaccgccggggatccacacgacaccatggcccagtccaagcacggcctgaccaaggagatgaccatgaagtaccgcatggagggctgcgtggacggccacaagttcgtgatcaccggcgagggcatcggctaccccttcaagggcaagcaggccatcaacctgtgcgtggtggagggcggccccttgcccttcgccgaggacatcttgtccgccgccttcatgtacggcaaccgcgtgttcaccgagtacccccaggacatcgtcgactacttcaagaactcctgccccgccggctacacctgggaccgctccttcctgttcgaggacggcgccgtgtgcatctgcaacgccgacatcaccgtgagcgtggaggagaactgcatgtaccacgagtccaagttctacggcgtgaacttccccgccgacggccccgtgatgaagaagatgaccgacaactgggagccctcctgcgagaagatcatccccgtgcccaagcagggcatcttgaagggcgacgtgagcatgtacctgctgctgaaggacggtggccgcttgcgctgccagttcgacaccgtgtacaaggccaagtccgtgccccgcaagatgcccgactggcacttcatccagcacaagctgacccgcgaggaccgcagcgacgccaagaaccagaagtggcacctgaccgagcacgccatcgcctccggctccgccttgccctccggactcagatctcgatagagtcaacctagacttgtccatcttctggattggccaacttaattaatgtatgaaataaaaggatgcacacatagtgacatgctaatcactataatgtgggcatcaaagttgtgtgttatgtgtaattactagttatctgaataaaagagaaagagatcatccatatttcttatcctaaatgaatgtcacgtgtctttataattctttgatgaaccagatgcatttcattaaccaaatccatatacatataaatattaatcatatataattaatatcaattgggttagcaaaacaaatctagtctaggtgtgttttgcgaattgcggcgcccttactttaacgcctctaaccaacacccctttatctttataaggaacaataaacagaatttgccccactgttctaaatcacctaataatatccccagctaaaaacaataaaggtttcctagaattaagacaagcatgactgttcctccaggagggtttggaacattgttgcagtcttgcagatacgggcgaagggtgagaaacagagcggagggctggaggtgacctcggtagtcgacgccggagttgagcttgacaacgacggggcggcccctgatggacttgaggaagtccgatggcgtcttcaccgtcccgccggcgcccgaggcgggcctgtcgctgccgccgccgccgctgctcatcttgcgcgctgtgcccccggcggtgtccctgtgttgcggatcgcgggtgggccaggtggatgcgagggcgacccgtttggactccggccggagccgccggatccctggtcggtgtcagtgccgtttactctgggccccacgtgtcagtaccgtctgtagatgacaacaacccgtcgtccacagtcatgtccaaaatatcctttcttcttttttttcgattcggatatctatcttccttttttttttccaaaaatcttcttgacgcaccagcgcgcacgtttgtggtaaacgccgacacgtcggtcccacgtcgatagaccccacccaccagtgagtagcgtgtacgtattcgggggtgacggacgtgtcgccgtcgtcttgctagtcccattcccatctgagccacacatctctgaacaaaaaaaaggagggaggcctccacgcacatccccctccgtgccacccgccccaaaccctcgcgccgcctccgagacagccgccgcaaccatggccaccgccgccgccgcgtctaccgcgctcactggcgccactaccgctgcgcccaaggcgaggcgccgggcgcacctcctggccacccgccgcgccctcgccgcgcccatcaggtgctcagcggcgtcacccgccatgccgatggctcccccggccaccccgctccggccgtggggccccaccgagccccgcaagggtgctgacatcctcgtcgagtccctcgagcgctgcggcgtccgcgacgtcttcgcctaccccggcggcgcgtccatggagatccaccaggcactcacccgctcccccgtcatcgccaaccacctcttccgccacgagcaaggggaggcctttgccgcctccggctacgcgcgctcctcgggccgcgtcggcgtctgcatcgccacctccggccccggcgccaccaacctagtctccgcgctcgccgacgcgctgctcgattccgtccccatggtcgccatcacgggacaggtggcgcgacgcatgattggcaccgacgccttccaggagacgcccatcgtcgaggtcacccgctccatcaccaagcacaactacctggtcctcgacgtcgacgacatcccccgcgtcgtgcaggaggctttcttcctcgcctcctctggtcgaccagggccggtgcttgtcgacatccccaaggacatccagcagcagatggcggtgcctgtctgggacaagcccatgagtctgcctgggtacattgcgcgccttcccaagccccctgcgactgagttgcttgagcaggtgctgcgtcttgttggtgaatcgcggcgccctgttctttatgtgggcggtggctgcgcagcatctggtgaggagttgcgacgctttgtggagctgactggaatcccggtcacaactactcttatgggcctcggcaacttccccagcgacgacccactgtctctgcgcatgctaggtatgcatgggacggtgtatgcaaattatgcagtggataaggccgatctgttgcttgcacttggtgtgcggtttgatgatcgcgtgacagggaagattgaggcttttgcaagcagggctaagattgtgcacgttgatattgatccggctgagattggcaagaacaagcagccacatgtgtccatctgtgcagatgttaagcttgctttgcagggcatgaatgctcttcttgaaggaagcacatcaaagaagagctttgactttggctcatggaacgatgagttggatcagcagaagagggaattcccccttgggtataaaacatctaatgaggagatccagccacaatatgctattcaggttcttgatgagctgacgaaaggcgaggccatcatcggcacaggtgttgggcagcaccagatgtgggcggcacagtactacacttacaagcggccaaggcagtggttgtcttcagctggtcttggggctatgggatttggtttgccggctgctgctggtgcttctgtggcaaacccaggtgtcactgttgttgacatcgatggagatggtagctttctcatgaacgttcaggagctagctatgatccgaattgagaacctcccagtgaaggtctttgtgctaaacaaccagcacctggggatggtggtgcagttggaggacaggttctataaggccaacagagcgcacacatacttgggaaacccagagaatgaaagtgagatatatccagatttcgtgacgatcgccaaagggttcaacattccagcggtccgtgtgacaaagaagaacgaagtccgcgcagcgataaagaagatgctcgagactccagggccgtacctcttggatataatcgtcccacaccaggagcatgtgttgcctatgatccctagtggtggggctttcaaggatatgatcctggatggtgatggcaggactgtgtactgactagctagtcagttaacagatctgccagatcctcggtgtacaaataacccgtcttatcctatgagacgggccggcgtcagtgtgttctggaggaatttttatgtcagagcctttttctttgtgtgcttgatgtagatgccaagggaagcttattggctgttgaagcttgatgcaaaataaattatggaactctgttttttgtttatctaataataactagcaaatatgcttccattgcattgaaactaacagccttttgtgtttccaagttttattttgtgacaatgtcatctatttcaattagttgtggaatcggaaacttgcaggactaacttggaaactccaatccctcagcatcctggactttttcctggtgtaatccatgtagatattattttaatcatcattttagttctggaggtttttccatctccggttttgctcccctttcttcaaaaaaaaaaaaaaaatgccgtaggcgccgcaacgcccacctgttgttcaaactcatgggcacgagtggctcgaagattttatacaacaattgctgtagtttcaccgttgctggtgaagaagcatttttttaaaaaaatatagtggtattcattttaattagtttagttgtgcagcgagcaaaatttggacatgctctgctcggaatctgatcgacctagacacagattagcagcagtagctttgtcatctgttccaagagttgcgatctgatagaagaaaaaaaaaccttcccttcaatgtaaaaccgaaactaacaagaaagaagcacagtgccgtttaggcaagtatggagtacgtattaagcatgtagaaggccatgcatgaaccactaacaagaaagaagcgcagtgccattcaggcaagcataagcatgtagattggcatgcatgaacaactaacagtagatcgtctctggtctgattagaagttttttgggaagccaagaaatcatgtacaactggttccatctcaaattccgtggcaaaaagaggcctaagcaacatacctcgagtagatcacattcaagcttggtcacccggtccgtcaatattctgattccgatgacttcgtaggttcctagctcaagccgctcgtgtccaagcgtcacttacgattagctaatgattacggcatctaggaccgactagtggcgcgccgactagctagctaaggtaccgagctcgaattcattccgattaatcgtggcctcttgctcttcaggatgaagagctatgtttaaacgtgcaagcgctactagacaattcagtacattaaaaacgtccgcaatgtgttattaagttgtctaagcgtcaatttgtttacaccacaatatatcctgcca

SEQ ID NO: 270 - DNA, 20917 bp, Artificial Sequence
  PHP100012
gtttacccgccaatatatcctgtcaaacactgcggccgcacttgaccgcggatggagccggagctgtggtgaggccatcgacgggaggtgggggagaacacagtctcagtgttctttgtgagtccgcaaggtttttagcttttctgtattaattaaggttgctgttggctgtagaatacggtcgtggaagagctgtatcggtagctactacgtaagctattatatactggaagtctggagctcgtcgatctccggtcgtcttcctccatttctcctcgtcttgctttgactgctgctaccatttgcttctgttttctgatgaagcatgccatgtcggccaccagtgtttgtgtggtttttgcagggaatggctttcaagtgctgtgattgaatggccctcgtcgtcctcggctgagctcacatggacgcgtcatgtgagtgagatatatgatcatatgatgagtggggttcgggtgagtgcgtacttgaagtaggatcccgctttcactcattcattcattggcctttaaaccgggaaattttcgcgaggagatggagggaagcaagcagggtgacgagtgcagagtgccgcgagcgctttgtcaaaaggcaccgccgtaggcaaaaaaatcaatggccctgactgactcgatggtagtactactgtagagactagagagggttgctccccatatcttcgtgtgacttttactccagcattgcatttccgtcattgagacgttaattaatagcagctttcgggacagatgactgtggccatgtttcgtcacggccgcttcgtgccagctgggggtactatagtactgtgattttgttagtaaaaactttcattaggccaccattgacgaccgggccttcgcttttgctgcgctaattaaccatttcccggcgaccgaagggaacatgaacatgccccgacacatgagggcatgaggactagtgttctccctgtcgttcgttgacttgactagtgatagtttaaacgctcttcaactggaagagcggttactaccggttcactagctagctgctaatcgagctagttaccctatgaggtgacatgaagcgctcacggttactatgacggttagcttcacgactgttggtggcagtagcgtacgacttagctatagttccggacttacccttaagataacttcgtatagcatacattatacgaagttatgggcccacgcgtgaagagcggttaccagagctggtcacctttgtccaccaagatggaactgtcttcggccagaatggccatctggattcagcaggcctagaaggccatttatcgctatcaactttgtatagaaaagttgggccgaattcgagctcggtacggccagaatggcccggaccgaagcttgcggccgcacactgatagtttaaactgaaggcgggaaacgacaatctgatcatgagcggagaattaagggagtcacgttatgacccccgccgatgacgcgggacaagccgttttacgtttggaactgacagaaccgcaacgttgaaggagccactcagccgcgggtttctggagtttaatgagctaagcacatacgtcagaaaccattattgcgcgttcaaaagtcgcctaaggtcactatcagctagcaaatatttcttgtcaaaaatgctccactgacgttccataaattcccctcggtatccaattagagtctcatattcactctcccgggggatctcgactctagaggatcgctcaggaaggccgctgagatagaggcatggcggccaatgcgggcggcggtggagcgggaggaggcagcggcagcggcagcgtggctgcgccggcggtgtgccgccccagcggctcgcggtggacgccgacgccggagcagatcaggatgctgaaggagctctactacggctgcggcatccggtcgcccagctcggagcagatccagcgcatcaccgccatgctgcggcagcacggcaagatcgagggcaagaacgtcttctactggttccagaaccacaaggcccgcgagcgccagaagcgccgcctcaccagcctcgacgtcaacgtgcccgccgccggcgcggccgacgccaccaccagccaactcggcgtcctctcgctgtcgtcgccgccgccttcaggcgcggcgcctccctcgcccaccctcggcttctacgccgccggcaatggcggcggatcggctgtgctgctggacacgagttccgactggggcagcagcggcgctgccatggccaccgagacatgcttcctgcaggactacatgggcgtgacggacacgggcagctcgtcgcagtggccacgcttctcgtcgtcggacacgataatggcggcggccgcggcgcgggcggcgacgacgcgggcgcccgagacgctccctctcttcccgacctgcggcgacgacggcggcagcggtagcagcagctacttgccgttctggggtgccgcgtccacaactgccggcgccacttcttccgttgcgatccagcagcaacaccagctgcaggagcagtacagcttttacagcaacagcaacagcacccagctggccggcaccggcaaccaagacgtatcggcaacagcagcagcagccgccgccctggagctgagcctcagctcatggtgctccccttaccctgctgcagggagtatgtgagagcaacgcgagctgccactgctcttcactgatgtctctggaatggaaggaggaggaagtgagcatagcgttggtgcgttgctgtcaagggcgaattcacatggttaacctagacttgtccatcttctggattggccaacttaattaatgtatgaaataaaaggatgcacacatagtgacatgctaatcactataatgtgggcatcaaagttgtgtgttatgtgtaattactagttatctgaataaaagagaaagagatcatccatatttcttatcctaaatgaatgtcacgtgtctttataattctttgatgaaccagatgcatttcattaaccaaatccatatacatataaatattaatcatatataattaatatcaattgggttagcaaaacaaatctagtctaggtgtgttttgcgaatgcggccgccaccgcggtggagctcgaattccggtccgggcctagaaggccagcttcaagtttgtacaaaaaagcaggctccggccagaatggcccggaccgtcactgactagctaaacagcggccgcatcgagcagctggcttgtggggaccagacaaaaaaggaatggtgcagaattgttaggcgcacctaccaaaagcatctttgcctttattgcaaagataaagcagattcctctagtacaagtggggaacaaaataacgtggaaaagagctgtcctgacagcccactcactaatgcgtatgacgaacgcagtgacgaccacaaaactcgagcaacgagatcatgagccaatcaaagaggagtgatgtagacctaaagcaataatggagccatgacgtaagggcttacgcccatacgaaataattaaaggctgatgtgacctgtcggtctctcagaacctttactttttatgtttggcgtgtatttttaaatttccacggcaatgacgatgtgaccgtcgacccactaaaacattgctttgtcaaaagctaaaaaagatgatgcccgacagccacttgtgtgaagcatgagaagccggtccctccactaagaaaattagtgaagcatcttccagtggtccctccactcacagctcaatcagtgagcaacaggacgaaggaaatgacgtaagccatgacgtctaatcccagggcccggtgaccaatcgaattagcttggcgcgtggaccgaagcttgcatgcctgcaatttaaataatcacaaataatattcacaaaaatatatctctaaatagacttgctaccaaaatatatttcgtcacgaatgttagtagattttattttttccgaagtagcagaattcatcagtttgcatataaatgcatcaaggtttgagcactgacgagcattgtattgtgccccctggatctactaacaccaagacgcactaccgcagcagcgcaggagcagacgagggagccagcccagcaggcatgggcgtgcttcggagcacgcaaagccttgaggcggaggtggacgagctgcgcgccgcgctcctggcgggcgggtggcaccgctcggctggccacgcggacgccaagcgcgctccccagggcgatgccagaggggccgcagcgcgcgccgtgtgcgtcactcgcggcatctccttcgtcgggttcgccgtcgtcgaccgcctcctccggcacgggtacaccgtccgcctcgcgttggagacgcaaggtaccaacgtcccgtccgtcctcccccacactaacctacccggctacttctctcgctcgctctgaagctctcgcgcccctcggcccggcctgggacaattggtttgggacaagggtatccggccgcgcggacagaggcaataagtaccaacggaatgtacctgtaggtgcgccagtgctggactcgagagagacagagctgcatccaacgtcggtgcctcccgcggtgcctcgcgccaggctaccagtacttccgcgcccaacaccacgccccaagctggttgatgcacgcccaacgccggtagttctatgcccccgtgatacaccgccgccgcgtccaacgccatgccccaagccgtcacccacgtcaaggctgcagacgtctccttcctcctccatgccgacatggtctacgctcaaatcgaagatgagctcaagccgcaacaacaaatttcggtgctcccaagcttcataaaggctatcttcggcgtcgttgcgatccatggtggcacagaatcgagttgatgttgtagctggcggctagggtttgaagtggagaagaggtccggctggtggcatcctatcgtctattgagggttgggtccggtggcatcatacttgatgacaattgaaagtaattttaatcaacttgtcatgagtagtgagtcttttataaaaaataagctgaaataagcaccctttgatgagcttataggattatcataatctcaaatgctaaattatataattttattagataagttgcttgtttgtttccccactagcttatttacattggattatataatctacataaattataatctcaaacaaaaagtccttaatcagagatcagcgaggtctcacgagtgagaaggcgagagcttgtccaaacgagcattttcgggcgtgtgaacacccatttcagcaaagccgtcgttgtccagttcagcgaagcgcattctgcggctttggcgtgacccattctgctagctcagcactgagaatacgcgtccgctgcagcgttggcgtacaggccggactacattagccaacgcgtatcggcagtggcaaaccctcttcgcttctaactccgctgggccaccagctttgaccgccgcctcccttcccctccgctactgctcctccccaccccactcccccgcaggagcggcggcggcggcggcgaggtcgtaccccacatcggcgagcggcggcggcaccgccggaggcaaaggcaagggatccatggccactgtgaacaactggctcgctttctccctctccccgcaggagctgccgccctcccagacgacggactccacactcatctcggccgccaccgccgaccatgtctccggcgatgtctgcttcaacatcccccaagattggagcatgaggggatcagagctttcggcgctcgtcgcggagccgaagctggaggacttcctcggcggcatctccttctccgagcagcatcacaaggccaactgcaacatgatacccagcactagcagcacagtttgctacgcgagctcaggtgctagcaccggctaccatcaccagctgtaccaccagcccaccagctcagcgctccacttcgcggactccgtaatggtggcttcctcggccggtgtccacgacggcggtgccatgctcagcgcggccgccgctaacggtgtcgctggcgctgccagtgccaacggcggcggcatcgggctgtccatgattaagaactggctgcggagccaaccggcgcccatgcagccgagggtggcggcggctgagggcgcgcaggggctctctttgtccatgaacatggcggggacgacccaaggcgctgctggcatgccacttctcgctggagagcgcgcacgggcgcccgagagtgtatcgacgtcagcacagggtggagccgtcgtcgtcacggcgccgaaggaggatagcggtggcagcggtgttgccggcgctctagtagccgtgagcacggacacgggtggcagcggcggcgcgtcggctgacaacacggcaaggaagacggtggacacgttcgggcagcgcacgtcgatttaccgtggcgtgacaaggcatagatggactgggagatatgaggcacatctttgggataacagttgcagaagggaagggcaaactcgtaagggtcgtcaagtctatttaggtggctatgataaagaggagaaagctgctagggcttatgatcttgctgctctgaagtactggggtgccacaacaacaacaaattttccagtgagtaactacgaaaaggagctcgaggacatgaagcacatgacaaggcaggagtttgtagcgtctctgagaaggaagagcagtggtttctccagaggtgcatccatttacaggggagtgactaggcatcaccaacatggaagatggcaagcacggattggacgagttgcagggaacaaggatctttacttgggcaccttcagcacccaggaggaggcagcggaggcgtacgacatcgcggcgatcaagttccgcggcctcaacgccgtcaccaacttcgacatgagccgctacgacgtgaagagcatcctggacagcagcgccctccccatcggcagcgccgccaagcgcctcaaggaggccgaggccgcagcgtccgcgcagcaccaccacgccggcgtggtgagctacgacgtcggccgcatcgcctcgcagctcggcgacggcggagccctggcggcggcgtacggcgcgcactaccacggcgccgcctggccgaccatcgcgttccagccgggcgccgccagcacaggcctgtaccacccgtacgcgcagcagccaatgcgcggcggcgggtggtgcaagcaggagcaggaccacgcggtgatcgcggccgcgcacagcctgcaggacctccaccacctgaacctgggcgcggccggcgcgcacgactttttctcggcagggcagcaggccgccgccgctgcgatgcacggcctgggtagcatcgacagtgcgtcgctcgagcacagcaccggctccaactccgtcgtctacaacggcggggtcggcgacagcaacggcgccagcgccgtcggcggcagtggcggtggctacatgatgccgatgagcgctgccggagcaaccactacatcggcaatggtgagccacgagcaggtgcatgcacgggcctacgacgaagccaagcaggctgctcagatggggtacgagagctacctggtgaacgcggagaacaatggtggcggaaggatgtctgcatgggggactgtcgtgtctgcagccgcggcggcagcagcaagcagcaacgacaacatggccgccgacgtcgggcatggcggcgcgcagctcttcagtgtctggaacgacacttaagcgtacgtgccggcctggctctccgaaagggcgtattccagcacactggcggccgttactagacccaacctagacttgtccatcttctggattggccaacttaattaatgtatgaaataaaaggatgcacacatagtgacatgctaatcactataatgtgggcatcaaagttgtgtgttatgtgtaattactagttatctgaataaaagagaaagagatcatccatatttcttatcctaaatgaatgtcacgtgtctttataattctttgatgaaccagatgcatttcattaaccaaatccatatacatataaatattaatcatatataattaatatcaattgggttagcaaaacaaatctagtctaggtgtgttttgcgaatgcggcctccgggcacccagctttcttgtacaaagtggccgttaacggatcggccagaatggcccggaccgggttaccccgcggttcaaagccaatgactgttgttaggtccagtttctaaggacgaatcatccaatcactggttctttctgaacaaaacaaagagctatagagttacgttactgtagccgagacagagcctgcaatctggttatgccacatactaggttctttcttaaagttgactcactctatcctaagttctacttacaaggagctacaacaaattggtcataaccggagagcgttcaaggaggtaatatcccatcttactctgtagcaaggctacaaaaggagagctaaagaactaggctacaaaaagagagctaaagaactaactatctagcaagactacagagctatagtgtagagatttcataaccggtgagcgttcaaggatactttgaagagaagaggtaatatctcaactagcaagactacaaaaaaatggagatataaaactaactgtctaacaagactacagagctatagtagagatagatacgttcgacacttaagcatgagaattcgagctcggtaccctggttcacaaactcaatacaacacacagtggagtagggtattacgctccggcggcccgaaccactctaaatccttgtgtcctcgtgtgctcttccaccattaatgactgtaattgcagggacacgaagagttgtagcgcttttgccaacaagatccgctatatgctagtagagtggaacctgcacagcaacaagcatccaataatctgagaataagaattatgtgtggtgatggttctcatctctgcaactcgccattttcgcgagagaaccaaatccaagttggtgaagatcatgatttgggctcatgggctggcatagtagctattacctttgcaattgtggttcgaatctatccgatattctccttttcagggagagctaatgcttatgcttattgggtattttggtttgacactgcttcacgcccaaaaaaaggcaactatgtctgagttggatatggcccaaaaaaaggcagctatgtctgagttggatatggaagtcttctttcgtttagggtgaagtaagaccaagctcatgagcttattatcttaggtcggaacaaattagttgataggcatggcacatttatcaaattataatgattttaacagaaaagcaacacctctttttcagcagcaccagctttgcaagctgcaattgacactccaagcatagtatttgctccaaactcagcctgcatttcgcacaatatcatatctatttccatttggataaaatatattttccagaaatatgggaacagaatcaagatacagaaaaaagttgtggtagtagtggtaagtggaaacacaagtacagtgaaaagatagcattatttctgaacagtcaaattaaccgaaataagtagtatcacatactgcccctaaattgactacacccaatgtaaagaattgcttgagcatattgagccatcagttgtttgtttgtgtaacggatttgacaatgcagagttcaggagcaaaaaaccgcaaaggagagaaagagggaaaggatctcctagtatcccaccttgtggcgcgccctgtcaagtgcatgatggcctggtcgatctgcgtctgctgctgcggttccatcccaacgagtgcctccgacaccttgtcgttgatcacccgcaccgcgtaggcgacccccctggcgaggaacttccgcctctcggaggccccggccgcgtcggcggcggcgccctcgagcgcgcccacgctagccgtagatgctcggtgcacggccttgttggtgtgcaactcgacctcaacggccggtgcgctacgcccgtcaaggatctggcgcgcccgcaccctcgtgatcacggtgggcgcctcccgcctcatgtggccgacgatgaaaagcgccgggttaggggccttggcgcgcaccgccgtattcagggcctcctcgctcttgcgcgagagcaggtgcttccccaggtactcctgcactgacaaggctgccacagcggtggaatttgtcctcacgacttcgccacgtcgtcctcacctccctggcttcccacgactccgccgtatcgaggtgctcggtgggtcgtcttaatccgaagtccgaactaggaagacgagacagagaggtctgaggaatgggcctcgtttgatgttgagctgaattatttttccagcataagcccaggtcttggtccatgaacaaaattactagaaacccagcccagtactacgatctaaaagagggactgccactggatagctctctctagcattctccacgctccaatacagcggcgtcgtgtctatccgggtctatccgcgaacacgtgagaactctccagaaactgctttctcctccacttcatctctctcgctttccctctataaaaagaccccttctaggaattgagggagacagcaagcaccaagcagcgatccgaagctcaatcaattcactcaaacctcttccccaaatcttcgattagatcttcgttgacaagaagactagaaccgaacctgacatgtccaacctgctcacggttcaccagaaccttccggctcttccagtggacgcgacgtccgatgaagtcaggaagaacctcatggacatgttccgcgacaggcaagcgttcagcgagcacacctggaagatgctgctctccgtctgccgctcctgggctgcatggtgcaagctgaacaacaggaagtggttccccgctgagcccgaggacgtgagggattaccttctgtacctgcaagcgcgaggtttgtttctgcttctacctttgatatatatataataattatcattaattagtagtaatataatatttcaaatatttttttcaaaataaaagaatgtagtatatagcaattgcttttctgtagtttataagtgtgtatattttaatttataacttttctaatatatgaccaaaacatggtgatgcctaggtctggcagtgaagaccatccagcaacaccttggacaactgaacatgcttcacaggcgctccggcctcccgcgccccagcgactcgaacgccgtgagcctcgtcatgcgccgcatcaggaaggaaaacgtcgatgccggcgaaagggcaaagcaggccctcgcgttcgagaggaccgatttcgaccaggtccgcagcctgatggagaacagcgacaggtgccaggacattaggaacctggcgttcctcggaattgcatacaacacgctcctcaggatcgcggaaattgcccgcattcgcgtgaaggacattagccgcaccgacggcggcaggatgcttatccacattggcaggaccaagacgctcgtttccaccgcaggcgtcgaaaaggccctcagcctcggagtgaccaagctcgtcgaacgctggatctccgtgtccggcgtcgcggacgacccaaacaactacctcttctgccgcgtccgcaagaacggggtggctgcccctagcgccaccagccaactcagcacgagggccttggaaggtattttcgaggccacccaccgcctgatctacggcgcgaaggatgacagcggtcaacgctacctcgcatggtccgggcactccgcccgcgttggagctgctagggacatggcccgcgccggtgtttccatccccgaaatcatgcaggcgggtggatggacgaacgtgaacattgtcatgaactacattcgcaaccttgacagcgagacgggcgcaatggttcgcctcctggaagatggtgactgaggtacccaacctagacttgtccatcttctggattggccaacttaattaatgtatgaaataaaaggatgcacacatagtgacatgctaatcactataatgtgggcatcaaagttgtgtgttatgtgtaattactagttatctgaataaaagagaaagagatcatccatatttcttatcctaaatgaatgtcacgtgtctttataattctttgatgaaccagatgcatttcattaaccaaatccatatacatataaatattaatcatatataattaatatcaattgggttagcaaaacaaatctagtctaggtgtgttttgcgatccgatatcgaattggccacggtaccagctgctgctgttctagggttcacaagtctgcctatttgtcttccccaatggagctatggttgtctggtctggtccttggtcgtgtcccgtttcattgtgtactatttacctgtaatgtgtatccttaagtctggtttgatggtgtctgaaacgttttgctgtggtagagcagcatggaagaactataatgaataagtgatccctaatcattgtgtccaaattttgcttctgctatacccttttgtgctgtttcttatgttttgcttaaaaatttgatctgacaaacaaatttgtctaaattatgctcttgttctgactgtgtactgtacacatttgtattgctaccggtttggcacatagttttctctttgattgcagatcaaacccttctgattgcagattgcttggctatggctgatgtgctcactgttcttctttagcttgtatattgctgatggtggcttggctacggctgaaaaagttgctgctgcgccgacttggcaactgttgctccagtaatgctttgtcctctcttcctagccgccgacttggcacttggcagctgttgctcctgtaatgcgttgttatctcttatctcttgagatgtactatgattttgaggctgtttgacttgtgccagattgccagtgctgatgctatattatctcaggtttttatgctagtatatgttttactgtgtgctgcctgtgtcgagttacgtaatctattgaaccgctatgcgtgttgatgccctgttgttgcttgccagattgatgcccctgttgcttgcagcttgcaagctgtagtgaaatcctaaaattccaaaccaaatctattctgaacttttgaagatctgtgatgtccggaagaaaagattcaaacagataaacgggactctccagaatctataaaataaatgatcgacaaacgctttgctttggtaggcttcaagcttggtcacccggtccgggcctagaaggccagcttcggccgccccgggcaactttattatacaaagttgatagataaatcagatatctggttcctaaggacccggcggaccgattaaactgattcggtccgacgcgttacctaataacttcgtatagcatacattatacgaagttattagctaactaactagtaagcttaagccatgggtcgacggatccgttaactagcgtggcatttggcaccgccgcacactatgcgagctaggagtgctagtttacagatgaaactatgaaaccaagaaaacacaattgtccgtagctagcgcgtggcgtcgtgtcaagcttcacacagtatcttcgttcttcactataaatcgcgcctgttgttcgtgagacccaccaccgtggataacagtcccctaataataagcgatcaacagcactgctgatggctgaacaccgaggcgccgccgcgcgtaaccatccgccggagcagcccgtcgtgccggcgaacgacgccttccccgaccgcgcccagcagctctgcctcgacgccgggcgcgcgctcgcgatgtgcggcgtgctcgtcgccgtccctcccgcattttacgcgtcgacgtcgcggacgacaccgcacttgccttcgtcggcttcgtcctctggatcatcggtgcgtggctgtgcctcctggcgctcacgcccttggctccacgggcggtgagggcgggcggggccgccgccagcaccttgctgatcaggtgcctgtccctttcatgaactactagcgcccgcgcccgcggccgccgggcacaagagaacacatcgatgttcgctgcgtacgtcagcaataaggcactctttgtcagtagtcgagtgcatatgttgggtgtttgccctgggagatttcaagtgttgtggccattatcccgcaggataaaaaatcggcggcttttggattgatacggaaaataacgatgtttcatgctcgtgttgtgtgtgtgacatcttgtcagccaagtttttaaccgttgctactccccctctgtgggctcagtgtgtggaccggaatacgtcgtacataggccgtagcctaagcccaatatgccgtttttcaggttggcctgtgtgacgacaagcgggtctcaaaagcccatcacgcaactggcctgcaattattggaggagagcgcgtcgagttggttccagaggctgcgtggtggggccggactctgcgacgacctctcgttcgcgtccgatttggttgccgtgagccgtgacgtaacgcctccttccgttcctccctatataagttccacccccgggtccggtttccccaagccccagtgacccccgatcccgatcgcgaaatctccgcacccgccggcaagggaccgaagcaagcctctctcccgaccgtcgcatcaaggtacgcgtccgctcgatctgtcctcttccttctcgatttgacttgctgtggtgcccgatcacgggatcagaatcgcaccagtgtagatttcgcatgttctaagatgtgttagtttccaggctaatccagttctcttgacgcccgatccgatcgagctccgtgtttatttcagcctaatcgtagtattcccctaaaatttcctcattagggggttcgcaagattgttggtcgacaggttcacttatgctcgatcgcttacttttagtcgattcatgctgcgtactattgttgccccccgtggttttatcttttctcgtgtgaaatccagtagatatagtagatatcgtagcattaggttttaattcaatcgattgattattgtatcatcaaaattgagaagttcgaatcatgcctatcatgctgcctcaaccgaaatcctgtatattgaagtttcaattcaattgattgatcattcattagattcaaccaaaatctagaaggttagatgacgcatgtcatgctgcctgcgtagtttacctttgatctgtttatgattaccttatcagtaggatatttgtgattttgggaagtagcactaactgattcatgctgacatgatgttccctttcagattatactgttgagtcctatctaattgatgctttgtatgctatatgaatacgtcatggtaaattagcagttaattagcatattagcaattgggcgtacctcatcaggattgctcttgtagatgtgtgtggtgatgtttcttgttcaattcatgttctgctttaaaagtatgtgttctctgtttgttaattaagattcatggttataatgatttggacctaattaatcagggttgcccttttagatgcgtggttacttgttgagttcatttttttcctgctatagttgtatgcgtttgttcattcatggttagatttgatttgtttcttctctattccatgccttccatatacttcaattgtagcttaacatgagatttctgtatatgcaggtcgaccgccggggatccacacgacaccatggcccagtccaagcacggcctgaccaaggagatgaccatgaagtaccgcatggagggctgcgtggacggccacaagttcgtgatcaccggcgagggcatcggctaccccttcaagggcaagcaggccatcaacctgtgcgtggtggagggcggccccttgcccttcgccgaggacatcttgtccgccgccttcatgtacggcaaccgcgtgttcaccgagtacccccaggacatcgtcgactacttcaagaactcctgccccgccggctacacctgggaccgctccttcctgttcgaggacggcgccgtgtgcatctgcaacgccgacatcaccgtgagcgtggaggagaactgcatgtaccacgagtccaagttctacggcgtgaacttccccgccgacggccccgtgatgaagaagatgaccgacaactgggagccctcctgcgagaagatcatccccgtgcccaagcagggcatcttgaagggcgacgtgagcatgtacctgctgctgaaggacggtggccgcttgcgctgccagttcgacaccgtgtacaaggccaagtccgtgccccgcaagatgcccgactggcacttcatccagcacaagctgacccgcgaggaccgcagcgacgccaagaaccagaagtggcacctgaccgagcacgccatcgcctccggctccgccttgccctccggactcagatctcgatagagtcaacctagacttgtccatcttctggattggccaacttaattaatgtatgaaataaaaggatgcacacatagtgacatgctaatcactataatgtgggcatcaaagttgtgtgttatgtgtaattactagttatctgaataaaagagaaagagatcatccatatttcttatcctaaatgaatgtcacgtgtctttataattctttgatgaaccagatgcatttcattaaccaaatccatatacatataaatattaatcatatataattaatatcaattgggttagcaaaacaaatctagtctaggtgtgttttgcgaattgcggcgcccttactttaacgcctctaaccaacacccctttatctttataaggaacaataaacagaatttgccccactgttctaaatcacctaataatatccccagctaaaaacaataaaggtttcctagaattaagacaagcatgactgttcctccaggagggtttggaacattgttgcagtcttgcagatacgggcgaagggtgagaaacagagcggagggctggaggtgacctcggtagtcgacgccggagttgagcttgacaacgacggggcggcccctgatggacttgaggaagtccgatggcgtcttcaccgtcccgccggcgcccgaggcgggcctgtcgctgccgccgccgccgctgctcatcttgcgcgctgtgcccccggcggtgtccctgtgttgcggatcgcgggtgggccaggtggatgcgagggcgacccgtttggactccggccggagccgccggatccctggtcggtgtcagtgccgtttactctgggccccacgtgtcagtaccgtctgtagatgacaacaacccgtcgtccacagtcatgtccaaaatatcctttcttcttttttttcgattcggatatctatcttccttttttttttccaaaaatcttcttgacgcaccagcgcgcacgtttgtggtaaacgccgacacgtcggtcccacgtcgatagaccccacccaccagtgagtagcgtgtacgtattcgggggtgacggacgtgtcgccgtcgtcttgctagtcccattcccatctgagccacacatctctgaacaaaaaaaaggagggaggcctccacgcacatccccctccgtgccacccgccccaaaccctcgcgccgcctccgagacagccgccgcaaccatggccaccgccgccgccgcgtctaccgcgctcactggcgccactaccgctgcgcccaaggcgaggcgccgggcgcacctcctggccacccgccgcgccctcgccgcgcccatcaggtgctcagcggcgtcacccgccatgccgatggctcccccggccaccccgctccggccgtggggccccaccgagccccgcaagggtgctgacatcctcgtcgagtccctcgagcgctgcggcgtccgcgacgtcttcgcctaccccggcggcgcgtccatggagatccaccaggcactcacccgctcccccgtcatcgccaaccacctcttccgccacgagcaaggggaggcctttgccgcctccggctacgcgcgctcctcgggccgcgtcggcgtctgcatcgccacctccggccccggcgccaccaacctagtctccgcgctcgccgacgcgctgctcgattccgtccccatggtcgccatcacgggacaggtggcgcgacgcatgattggcaccgacgccttccaggagacgcccatcgtcgaggtcacccgctccatcaccaagcacaactacctggtcctcgacgtcgacgacatcccccgcgtcgtgcaggaggctttcttcctcgcctcctctggtcgaccagggccggtgcttgtcgacatccccaaggacatccagcagcagatggcggtgcctgtctgggacaagcccatgagtctgcctgggtacattgcgcgccttcccaagccccctgcgactgagttgcttgagcaggtgctgcgtcttgttggtgaatcgcggcgccctgttctttatgtgggcggtggctgcgcagcatctggtgaggagttgcgacgctttgtggagctgactggaatcccggtcacaactactcttatgggcctcggcaacttccccagcgacgacccactgtctctgcgcatgctaggtatgcatgggacggtgtatgcaaattatgcagtggataaggccgatctgttgcttgcacttggtgtgcggtttgatgatcgcgtgacagggaagattgaggcttttgcaagcagggctaagattgtgcacgttgatattgatccggctgagattggcaagaacaagcagccacatgtgtccatctgtgcagatgttaagcttgctttgcagggcatgaatgctcttcttgaaggaagcacatcaaagaagagctttgactttggctcatggaacgatgagttggatcagcagaagagggaattcccccttgggtataaaacatctaatgaggagatccagccacaatatgctattcaggttcttgatgagctgacgaaaggcgaggccatcatcggcacaggtgttgggcagcaccagatgtgggcggcacagtactacacttacaagcggccaaggcagtggttgtcttcagctggtcttggggctatgggatttggtttgccggctgctgctggtgcttctgtggcaaacccaggtgtcactgttgttgacatcgatggagatggtagctttctcatgaacgttcaggagctagctatgatccgaattgagaacctcccagtgaaggtctttgtgctaaacaaccagcacctggggatggtggtgcagttggaggacaggttctataaggccaacagagcgcacacatacttgggaaacccagagaatgaaagtgagatatatccagatttcgtgacgatcgccaaagggttcaacattccagcggtccgtgtgacaaagaagaacgaagtccgcgcagcgataaagaagatgctcgagactccagggccgtacctcttggatataatcgtcccacaccaggagcatgtgttgcctatgatccctagtggtggggctttcaaggatatgatcctggatggtgatggcaggactgtgtactgactagctagtcagttaacagatctgccagatcctcggtgtacaaataacccgtcttatcctatgagacgggccggcgtcagtgtgttctggaggaatttttatgtcagagcctttttctttgtgtgcttgatgtagatgccaagggaagcttattggctgttgaagcttgatgcaaaataaattatggaactctgttttttgtttatctaataataactagcaaatatgcttccattgcattgaaactaacagccttttgtgtttccaagttttattttgtgacaatgtcatctatttcaattagttgtggaatcggaaacttgcaggactaacttggaaactccaatccctcagcatcctggactttttcctggtgtaatccatgtagatattattttaatcatcattttagttctggaggtttttccatctccggttttgctcccctttcttcaaaaaaaaaaaaaaaatgccgtaggcgccgcaacgcccacctgttgttcaaactcatgggcacgagtggctcgaagattttatacaacaattgctgtagtttcaccgttgctggtgaagaagcatttttttaaaaaaatatagtggtattcattttaattagtttagttgtgcagcgagcaaaatttggacatgctctgctcggaatctgatcgacctagacacagattagcagcagtagctttgtcatctgttccaagagttgcgatctgatagaagaaaaaaaaaccttcccttcaatgtaaaaccgaaactaacaagaaagaagcacagtgccgtttaggcaagtatggagtacgtattaagcatgtagaaggccatgcatgaaccactaacaagaaagaagcgcagtgccattcaggcaagcataagcatgtagattggcatgcatgaacaactaacagtagatcgtctctggtctgattagaagttttttgggaagccaagaaatcatgtacaactggttccatctcaaattccgtggcaaaaagaggcctaagcaacatacctcgagtagatcacattcaagcttggtcacccggtccgtcaatattctgattccgatgacttcgtaggttcctagctcaagccgctcgtgtccaagcgtcacttacgattagctaatgattacggcatctaggaccgactagtggcgcgccgactagctagctaaggtaccgagctcgaattcattccgattaatcgtggcctcttgctcttcaggatgaagagctatgtttaaacgtgcaagcgctactagacaattcagtacattaaaaacgtccgcaatgtgttattaagttgtctaagcgtcaatttgtttacaccacaatatatcctgcca

SEQ ID NO: 271 - DNA, 22394 bp, Artificial Sequence
  PHP100013
gtttacccgccaatatatcctgtcaaacactgcggccgcacttgaccgcggatggagccggagctgtggtgaggccatcgacgggaggtgggggagaacacagtctcagtgttctttgtgagtccgcaaggtttttagcttttctgtattaattaaggttgctgttggctgtagaatacggtcgtggaagagctgtatcggtagctactacgtaagctattatatactggaagtctggagctcgtcgatctccggtcgtcttcctccatttctcctcgtcttgctttgactgctgctaccatttgcttctgttttctgatgaagcatgccatgtcggccaccagtgtttgtgtggtttttgcagggaatggctttcaagtgctgtgattgaatggccctcgtcgtcctcggctgagctcacatggacgcgtcatgtgagtgagatatatgatcatatgatgagtggggttcgggtgagtgcgtacttgaagtaggatcccgctttcactcattcattcattggcctttaaaccgggaaattttcgcgaggagatggagggaagcaagcagggtgacgagtgcagagtgccgcgagcgctttgtcaaaaggcaccgccgtaggcaaaaaaatcaatggccctgactgactcgatggtagtactactgtagagactagagagggttgctccccatatcttcgtgtgacttttactccagcattgcatttccgtcattgagacgttaattaatagcagctttcgggacagatgactgtggccatgtttcgtcacggccgcttcgtgccagctgggggtactatagtactgtgattttgttagtaaaaactttcattaggccaccattgacgaccgggccttcgcttttgctgcgctaattaaccatttcccggcgaccgaagggaacatgaacatgccccgacacatgagggcatgaggactagtgttctccctgtcgttcgttgacttgactagtgatagtttaaacgctcttcaactggaagagcggttactaccggttcactagctagctgctaatcgagctagttaccctatgaggtgacatgaagcgctcacggttactatgacggttagcttcacgactgttggtggcagtagcgtacgacttagctatagttccggacttacccttaagataacttcgtatagcatacattatacgaagttatgggcccacgcgtgaagagcggttaccagagctggtcacctttgtccaccaagatggaactgtcttcggccagaatggccatctggattcagcaggcctagaaggccatttatcgctatcaactttgtatagaaaagttgggccgaattcgagctcggtacggccagaatggcccggaccgaagcttgcggccgcacactgatagtttaaactgaaggcgggaaacgacaatctgatcatgagcggagaattaagggagtcacgttatgacccccgccgatgacgcgggacaagccgttttacgtttggaactgacagaaccgcaacgttgaaggagccactcagccgcgggtttctggagtttaatgagctaagcacatacgtcagaaaccattattgcgcgttcaaaagtcgcctaaggtcactatcagctagcaaatatttcttgtcaaaaatgctccactgacgttccataaattcccctcggtatccaattagagtctcatattcactctcccgggggatctcgactctagaggatcgctcaggaaggccgctgagatagaggcatggcggccaatgcgggcggcggtggagcgggaggaggcagcggcagcggcagcgtggctgcgccggcggtgtgccgccccagcggctcgcggtggacgccgacgccggagcagatcaggatgctgaaggagctctactacggctgcggcatccggtcgcccagctcggagcagatccagcgcatcaccgccatgctgcggcagcacggcaagatcgagggcaagaacgtcttctactggttccagaaccacaaggcccgcgagcgccagaagcgccgcctcaccagcctcgacgtcaacgtgcccgccgccggcgcggccgacgccaccaccagccaactcggcgtcctctcgctgtcgtcgccgccgccttcaggcgcggcgcctccctcgcccaccctcggcttctacgccgccggcaatggcggcggatcggctgtgctgctggacacgagttccgactggggcagcagcggcgctgccatggccaccgagacatgcttcctgcaggactacatgggcgtgacggacacgggcagctcgtcgcagtggccacgcttctcgtcgtcggacacgataatggcggcggccgcggcgcgggcggcgacgacgcgggcgcccgagacgctccctctcttcccgacctgcggcgacgacggcggcagcggtagcagcagctacttgccgttctggggtgccgcgtccacaactgccggcgccacttcttccgttgcgatccagcagcaacaccagctgcaggagcagtacagcttttacagcaacagcaacagcacccagctggccggcaccggcaaccaagacgtatcggcaacagcagcagcagccgccgccctggagctgagcctcagctcatggtgctccccttaccctgctgcagggagtatgtgagagcaacgcgagctgccactgctcttcactgatgtctctggaatggaaggaggaggaagtgagcatagcgttggtgcgttgctgtcaagggcgaattcacatggttaacctagacttgtccatcttctggattggccaacttaattaatgtatgaaataaaaggatgcacacatagtgacatgctaatcactataatgtgggcatcaaagttgtgtgttatgtgtaattactagttatctgaataaaagagaaagagatcatccatatttcttatcctaaatgaatgtcacgtgtctttataattctttgatgaaccagatgcatttcattaaccaaatccatatacatataaatattaatcatatataattaatatcaattgggttagcaaaacaaatctagtctaggtgtgttttgcgaatgcggccgccaccgcggtggagctcgaattccggtccgggcctagaaggccagcttcaagtttgtacaaaaaagcaggctccggccagaatggcccggaccgtcactgactagctaaacagcggccgcatcgagcagctggcttgtggggaccagacaaaaaaggaatggtgcagaattgttaggcgcacctaccaaaagcatctttgcctttattgcaaagataaagcagattcctctagtacaagtggggaacaaaataacgtggaaaagagctgtcctgacagcccactcactaatgcgtatgacgaacgcagtgacgaccacaaaactcgagcaacgagatcatgagccaatcaaagaggagtgatgtagacctaaagcaataatggagccatgacgtaagggcttacgcccatacgaaataattaaaggctgatgtgacctgtcggtctctcagaacctttactttttatgtttggcgtgtatttttaaatttccacggcaatgacgatgtgaccgtcgacccactaaaacattgctttgtcaaaagctaaaaaagatgatgcccgacagccacttgtgtgaagcatgagaagccggtccctccactaagaaaattagtgaagcatcttccagtggtccctccactcacagctcaatcagtgagcaacaggacgaaggaaatgacgtaagccatgacgtctaatcccagggcccggtgaccaatcgaattagcttggcgcgtggaccgaagcttgcatgcctgcaggtaccgtccatgggtatccgaaacctgaatacctgattagaagacgggtatgggatggttcctttaccaattaatgggaaagaacgtctactcgtttggtagacgggtataggtggatactaccccatacccgtctacccgtaaaaaatatgctcgcaacataccaatattatcatctaataaagcccatcttaactagaaggaaccccttgttcgaatattatttgtttaattatcaagttatgtagtcatgtggtttgttatatttgaagttcaacttatttttatatgtttgtttgtcattctgagtgattggcatattacaatttaagatttttctagcggtacgggctacccgatggataaaattacctacgcggggtatgtgtacgagtaagattgtatattgtgagtgtatatgggcaactcgacgaacatatttttttggtggatacaagtatggaatgctattacctgtcaggtttatattcattgccatctctatccccatatggtgattgtcctcctacattcgtgacaattccccaaggagcaacaggcgacattgatgtcacttcgaacaaatctgcttactttaatgcttcataattttaacaacaaagaggatggaggaagacaacagataaaatatcgataaatacacatatttaaaaaaaatccacactattttaggctcacaatagtttttaaagtccatatttcttagatccatgaatggctactacactcaattaactctattgatggcaacaataaaaagagatcaaaattatgggtaaatagccaacacatataactccaccgcataagcgcgtcaccacaatacccaaaacaactaaagaaccgatggtcgatgagcgatcataagatcaacctctttaacaacatctacaaccgtttgtgcacagcctgattgagtgacccaatgaggctatgctgctttaagcggttaaggaaaatttccacaacaagcatagaaaaaacaagttggagcacacgtgacacgttatgccattagctcaagtggtgcgtaaaacacgatgataatgactcgagtgatgagagaaaaagatatgttcttaacttggacgacaatcaaagctcaatgacatatgaaagtatggacacactatgctctattgtcaccatagggcaagagttcagtagaaggcaaattgttcgacaacaagctatgttggtcttttgattctgacgagtcaatgatagcttttcaatgatactattaactttctaaaattaggaagcaacaaaaaatctacaaaaaacatactttttaacttttggtaaaagctaaacttttttgagttttttcccgaaagcacgcctagtcagccaccagctggcacgcgagtctcccaacaataggagggaccacctgtcatgctgtgggaccacgaagaaaaccctccagagacgacgatagacctccgtccatagacgcggtctaccgtggtccggacgctcccggccgcgaattcaggtcgtggcgggccctgccgacccaactactggtccagaggcctccacgcgagccgtgggccgtggtctaggagccgggtccgcctatctacttgacggtcacggaaacccggacccggtaggaaggagctataaagacaagccaaacgagggcatcccttcttcagccgcacgcttcttgttgccaaagaattccctcccctagccgccgccgccgccgctcgtctccctgagaggtgccgggaccgaggaactggccgagtactaggtagagaatcggtttttcttgtctcagcccggggtctgctgcgtctggtggtggtgaaggggagaaattcgtgagatctgttccggatcaggcgtgcgagctcgggaatcaggggtttcacacatagcttcgtcgatttgtaagttttttctagccgattcctctctttttgtacgttttttgttattagattcgagatttgttggatgtgttggtttatgttgctgcctttctagatttctcggtgtgaatgtatgagggttcgatccttaggcatgaaaacatagctacatggagttagctcgttttcttaagtcacgtggtggtcggcgttatacctgttgcttgatgcgttatccgtgctatcgctgttcagatttagataggtggatcggtcatttgttcgttgtacgtattttgttacttcaaaattgatgctaaccctgttaattgaaaattgatggcagtggatacgctccacctttgtttagatttggaaacatggttaggaaatatgtgttcatattaggaaacgtggataggaaatatggctcattaccctggtactcggaaaagtaaggaaaaactattaacctttttgtttaggttttgattcgtggacaagatctataaattcactgaaaagacgcatacgatttcttgtacaggtgatatcatgccatgtggaaagtaaatgaaatcatacaaggctgatttttgcttttgttcccatcagatctgtgatttagttttgttttcccaaacaggttatgtttggtcatgtactcatgtgaatgatatagatctgttgctctaattagttagaaacatttattttgggcatatatctttaatggcataactgtggtacgttgtgatggtttattttagctgtcgtgcctggatcatcaacatcttgttttatcttttatgagaagaatttttgttcgatttgatggatgtgttcaatattttggtcttccatgcaggaatttgatgtactaatggagtctaagggtggcaaaaagtctagcagtagtcgttctatgatgtatgaagctccccttggctacagcattgaggacgttcgacctgccggaggcgtgaagaagttccagtctgctgcttactccaacgtaaaaaatcaatcatcacaatgatgctcttcattctacctcttgtattttattagatatatgttgatagtaacatctattttttcttgttgcagtgcgcgaagaagccatcctgatatcccttttggcttcctcattctagtagtttaggatttcttttctgacactttgattctgaccaatctctctggcctgctgcttcctgataatcgaccagttccccagtcttgctccttgcactcctccctccatctccagcattgtgttctgattcacctgctccaggatccatggccactgtgaacaactggctcgctttctccctctccccgcaggagctgccgccctcccagacgacggactccacactcatctcggccgccaccgccgaccatgtctccggcgatgtctgcttcaacatcccccaagattggagcatgaggggatcagagctttcggcgctcgtcgcggagccgaagctggaggacttcctcggcggcatctccttctccgagcagcatcacaaggccaactgcaacatgatacccagcactagcagcacagtttgctacgcgagctcaggtgctagcaccggctaccatcaccagctgtaccaccagcccaccagctcagcgctccacttcgcggactccgtaatggtggcttcctcggccggtgtccacgacggcggtgccatgctcagcgcggccgccgctaacggtgtcgctggcgctgccagtgccaacggcggcggcatcgggctgtccatgattaagaactggctgcggagccaaccggcgcccatgcagccgagggtggcggcggctgagggcgcgcaggggctctctttgtccatgaacatggcggggacgacccaaggcgctgctggcatgccacttctcgctggagagcgcgcacgggcgcccgagagtgtatcgacgtcagcacagggtggagccgtcgtcgtcacggcgccgaaggaggatagcggtggcagcggtgttgccggcgctctagtagccgtgagcacggacacgggtggcagcggcggcgcgtcggctgacaacacggcaaggaagacggtggacacgttcgggcagcgcacgtcgatttaccgtggcgtgacaaggcatagatggactgggagatatgaggcacatctttgggataacagttgcagaagggaagggcaaactcgtaagggtcgtcaagtctatttaggtggctatgataaagaggagaaagctgctagggcttatgatcttgctgctctgaagtactggggtgccacaacaacaacaaattttccagtgagtaactacgaaaaggagctcgaggacatgaagcacatgacaaggcaggagtttgtagcgtctctgagaaggaagagcagtggtttctccagaggtgcatccatttacaggggagtgactaggcatcaccaacatggaagatggcaagcacggattggacgagttgcagggaacaaggatctttacttgggcaccttcagcacccaggaggaggcagcggaggcgtacgacatcgcggcgatcaagttccgcggcctcaacgccgtcaccaacttcgacatgagccgctacgacgtgaagagcatcctggacagcagcgccctccccatcggcagcgccgccaagcgcctcaaggaggccgaggccgcagcgtccgcgcagcaccaccacgccggcgtggtgagctacgacgtcggccgcatcgcctcgcagctcggcgacggcggagccctggcggcggcgtacggcgcgcactaccacggcgccgcctggccgaccatcgcgttccagccgggcgccgccagcacaggcctgtaccacccgtacgcgcagcagccaatgcgcggcggcgggtggtgcaagcaggagcaggaccacgcggtgatcgcggccgcgcacagcctgcaggacctccaccacctgaacctgggcgcggccggcgcgcacgactttttctcggcagggcagcaggccgccgccgctgcgatgcacggcctgggtagcatcgacagtgcgtcgctcgagcacagcaccggctccaactccgtcgtctacaacggcggggtcggcgacagcaacggcgccagcgccgtcggcggcagtggcggtggctacatgatgccgatgagcgctgccggagcaaccactacatcggcaatggtgagccacgagcaggtgcatgcacgggcctacgacgaagccaagcaggctgctcagatggggtacgagagctacctggtgaacgcggagaacaatggtggcggaaggatgtctgcatgggggactgtcgtgtctgcagccgcggcggcagcagcaagcagcaacgacaacatggccgccgacgtcgggcatggcggcgcgcagctcttcagtgtctggaacgacacttaagcgtacgtgccggcctggctctccgaaagggcgtattccagcacactggcggccgttactagacccaacctagacttgtccatcttctggattggccaacttaattaatgtatgaaataaaaggatgcacacatagtgacatgctaatcactataatgtgggcatcaaagttgtgtgttatgtgtaattactagttatctgaataaaagagaaagagatcatccatatttcttatcctaaatgaatgtcacgtgtctttataattctttgatgaaccagatgcatttcattaaccaaatccatatacatataaatattaatcatatataattaatatcaattgggttagcaaaacaaatctagtctaggtgtgttttgcgaatgcggcctccgggcacccagctttcttgtacaaagtggccgttaacggatcggccagaatggcccggaccgggttaccccgcggttcaaagccaatgactgttgttaggtccagtttctaaggacgaatcatccaatcactggttctttctgaacaaaacaaagagctatagagttacgttactgtagccgagacagagcctgcaatctggttatgccacatactaggttctttcttaaagttgactcactctatcctaagttctacttacaaggagctacaacaaattggtcataaccggagagcgttcaaggaggtaatatcccatcttactctgtagcaaggctacaaaaggagagctaaagaactaggctacaaaaagagagctaaagaactaactatctagcaagactacagagctatagtgtagagatttcataaccggtgagcgttcaaggatactttgaagagaagaggtaatatctcaactagcaagactacaaaaaaatggagatataaaactaactgtctaacaagactacagagctatagtagagatagatacgttcgacacttaagcatgagaattcgagctcggtaccctggttcacaaactcaatacaacacacagtggagtagggtattacgctccggcggcccgaaccactctaaatccttgtgtcctcgtgtgctcttccaccattaatgactgtaattgcagggacacgaagagttgtagcgcttttgccaacaagatccgctatatgctagtagagtggaacctgcacagcaacaagcatccaataatctgagaataagaattatgtgtggtgatggttctcatctctgcaactcgccattttcgcgagagaaccaaatccaagttggtgaagatcatgatttgggctcatgggctggcatagtagctattacctttgcaattgtggttcgaatctatccgatattctccttttcagggagagctaatgcttatgcttattgggtattttggtttgacactgcttcacgcccaaaaaaaggcaactatgtctgagttggatatggcccaaaaaaaggcagctatgtctgagttggatatggaagtcttctttcgtttagggtgaagtaagaccaagctcatgagcttattatcttaggtcggaacaaattagttgataggcatggcacatttatcaaattataatgattttaacagaaaagcaacacctctttttcagcagcaccagctttgcaagctgcaattgacactccaagcatagtatttgctccaaactcagcctgcatttcgcacaatatcatatctatttccatttggataaaatatattttccagaaatatgggaacagaatcaagatacagaaaaaagttgtggtagtagtggtaagtggaaacacaagtacagtgaaaagatagcattatttctgaacagtcaaattaaccgaaataagtagtatcacatactgcccctaaattgactacacccaatgtaaagaattgcttgagcatattgagccatcagttgtttgtttgtgtaacggatttgacaatgcagagttcaggagcaaaaaaccgcaaaggagagaaagagggaaaggatctcctagtatcccaccttgtggcgcgccctgtcaagtgcatgatggcctggtcgatctgcgtctgctgctgcggttccatcccaacgagtgcctccgacaccttgtcgttgatcacccgcaccgcgtaggcgacccccctggcgaggaacttccgcctctcggaggccccggccgcgtcggcggcggcgccctcgagcgcgcccacgctagccgtagatgctcggtgcacggccttgttggtgtgcaactcgacctcaacggccggtgcgctacgcccgtcaaggatctggcgcgcccgcaccctcgtgatcacggtgggcgcctcccgcctcatgtggccgacgatgaaaagcgccgggttaggggccttggcgcgcaccgccgtattcagggcctcctcgctcttgcgcgagagcaggtgcttccccaggtactcctgcactgacaaggctgccacagcggtggaatttgtcctcacgacttcgccacgtcgtcctcacctccctggcttcccacgactccgccgtatcgaggtgctcggtgggtcgtcttaatccgaagtccgaactaggaagacgagacagagaggtctgaggaatgggcctcgtttgatgttgagctgaattatttttccagcataagcccaggtcttggtccatgaacaaaattactagaaacccagcccagtactacgatctaaaagagggactgccactggatagctctctctagcattctccacgctccaatacagcggcgtcgtgtctatccgggtctatccgcgaacacgtgagaactctccagaaactgctttctcctccacttcatctctctcgctttccctctataaaaagaccccttctaggaattgagggagacagcaagcaccaagcagcgatccgaagctcaatcaattcactcaaacctcttccccaaatcttcgattagatcttcgttgacaagaagactagaaccgaacctgacatgtccaacctgctcacggttcaccagaaccttccggctcttccagtggacgcgacgtccgatgaagtcaggaagaacctcatggacatgttccgcgacaggcaagcgttcagcgagcacacctggaagatgctgctctccgtctgccgctcctgggctgcatggtgcaagctgaacaacaggaagtggttccccgctgagcccgaggacgtgagggattaccttctgtacctgcaagcgcgaggtttgtttctgcttctacctttgatatatatataataattatcattaattagtagtaatataatatttcaaatatttttttcaaaataaaagaatgtagtatatagcaattgcttttctgtagtttataagtgtgtatattttaatttataacttttctaatatatgaccaaaacatggtgatgcctaggtctggcagtgaagaccatccagcaacaccttggacaactgaacatgcttcacaggcgctccggcctcccgcgccccagcgactcgaacgccgtgagcctcgtcatgcgccgcatcaggaaggaaaacgtcgatgccggcgaaagggcaaagcaggccctcgcgttcgagaggaccgatttcgaccaggtccgcagcctgatggagaacagcgacaggtgccaggacattaggaacctggcgttcctcggaattgcatacaacacgctcctcaggatcgcggaaattgcccgcattcgcgtgaaggacattagccgcaccgacggcggcaggatgcttatccacattggcaggaccaagacgctcgtttccaccgcaggcgtcgaaaaggccctcagcctcggagtgaccaagctcgtcgaacgctggatctccgtgtccggcgtcgcggacgacccaaacaactacctcttctgccgcgtccgcaagaacggggtggctgcccctagcgccaccagccaactcagcacgagggccttggaaggtattttcgaggccacccaccgcctgatctacggcgcgaaggatgacagcggtcaacgctacctcgcatggtccgggcactccgcccgcgttggagctgctagggacatggcccgcgccggtgtttccatccccgaaatcatgcaggcgggtggatggacgaacgtgaacattgtcatgaactacattcgcaaccttgacagcgagacgggcgcaatggttcgcctcctggaagatggtgactgaggtacccaacctagacttgtccatcttctggattggccaacttaattaatgtatgaaataaaaggatgcacacatagtgacatgctaatcactataatgtgggcatcaaagttgtgtgttatgtgtaattactagttatctgaataaaagagaaagagatcatccatatttcttatcctaaatgaatgtcacgtgtctttataattctttgatgaaccagatgcatttcattaaccaaatccatatacatataaatattaatcatatataattaatatcaattgggttagcaaaacaaatctagtctaggtgtgttttgcgatccgatatcgaattggccacggtaccagctgctgctgttctagggttcacaagtctgcctatttgtcttccccaatggagctatggttgtctggtctggtccttggtcgtgtcccgtttcattgtgtactatttacctgtaatgtgtatccttaagtctggtttgatggtgtctgaaacgttttgctgtggtagagcagcatggaagaactataatgaataagtgatccctaatcattgtgtccaaattttgcttctgctatacccttttgtgctgtttcttatgttttgcttaaaaatttgatctgacaaacaaatttgtctaaattatgctcttgttctgactgtgtactgtacacatttgtattgctaccggtttggcacatagttttctctttgattgcagatcaaacccttctgattgcagattgcttggctatggctgatgtgctcactgttcttctttagcttgtatattgctgatggtggcttggctacggctgaaaaagttgctgctgcgccgacttggcaactgttgctccagtaatgctttgtcctctcttcctagccgccgacttggcacttggcagctgttgctcctgtaatgcgttgttatctcttatctcttgagatgtactatgattttgaggctgtttgacttgtgccagattgccagtgctgatgctatattatctcaggtttttatgctagtatatgttttactgtgtgctgcctgtgtcgagttacgtaatctattgaaccgctatgcgtgttgatgccctgttgttgcttgccagattgatgcccctgttgcttgcagcttgcaagctgtagtgaaatcctaaaattccaaaccaaatctattctgaacttttgaagatctgtgatgtccggaagaaaagattcaaacagataaacgggactctccagaatctataaaataaatgatcgacaaacgctttgctttggtaggcttcaagcttggtcacccggtccgggcctagaaggccagcttcggccgccccgggcaactttattatacaaagttgatagataaatcagatatctggttcctaaggacccggcggaccgattaaactgattcggtccgacgcgttacctaataacttcgtatagcatacattatacgaagttattagctaactaactagtaagcttaagccatgggtcgacggatccgttaactagcgtggcatttggcaccgccgcacactatgcgagctaggagtgctagtttacagatgaaactatgaaaccaagaaaacacaattgtccgtagctagcgcgtggcgtcgtgtcaagcttcacacagtatcttcgttcttcactataaatcgcgcctgttgttcgtgagacccaccaccgtggataacagtcccctaataataagcgatcaacagcactgctgatggctgaacaccgaggcgccgccgcgcgtaaccatccgccggagcagcccgtcgtgccggcgaacgacgccttccccgaccgcgcccagcagctctgcctcgacgccgggcgcgcgctcgcgatgtgcggcgtgctcgtcgccgtccctcccgcattttacgcgtcgacgtcgcggacgacaccgcacttgccttcgtcggcttcgtcctctggatcatcggtgcgtggctgtgcctcctggcgctcacgcccttggctccacgggcggtgagggcgggcggggccgccgccagcaccttgctgatcaggtgcctgtccctttcatgaactactagcgcccgcgcccgcggccgccgggcacaagagaacacatcgatgttcgctgcgtacgtcagcaataaggcactctttgtcagtagtcgagtgcatatgttgggtgtttgccctgggagatttcaagtgttgtggccattatcccgcaggataaaaaatcggcggcttttggattgatacggaaaataacgatgtttcatgctcgtgttgtgtgtgtgacatcttgtcagccaagtttttaaccgttgctactccccctctgtgggctcagtgtgtggaccggaatacgtcgtacataggccgtagcctaagcccaatatgccgtttttcaggttggcctgtgtgacgacaagcgggtctcaaaagcccatcacgcaactggcctgcaattattggaggagagcgcgtcgagttggttccagaggctgcgtggtggggccggactctgcgacgacctctcgttcgcgtccgatttggttgccgtgagccgtgacgtaacgcctccttccgttcctccctatataagttccacccccgggtccggtttccccaagccccagtgacccccgatcccgatcgcgaaatctccgcacccgccggcaagggaccgaagcaagcctctctcccgaccgtcgcatcaaggtacgcgtccgctcgatctgtcctcttccttctcgatttgacttgctgtggtgcccgatcacgggatcagaatcgcaccagtgtagatttcgcatgttctaagatgtgttagtttccaggctaatccagttctcttgacgcccgatccgatcgagctccgtgtttatttcagcctaatcgtagtattcccctaaaatttcctcattagggggttcgcaagattgttggtcgacaggttcacttatgctcgatcgcttacttttagtcgattcatgctgcgtactattgttgccccccgtggttttatcttttctcgtgtgaaatccagtagatatagtagatatcgtagcattaggttttaattcaatcgattgattattgtatcatcaaaattgagaagttcgaatcatgcctatcatgctgcctcaaccgaaatcctgtatattgaagtttcaattcaattgattgatcattcattagattcaaccaaaatctagaaggttagatgacgcatgtcatgctgcctgcgtagtttacctttgatctgtttatgattaccttatcagtaggatatttgtgattttgggaagtagcactaactgattcatgctgacatgatgttccctttcagattatactgttgagtcctatctaattgatgctttgtatgctatatgaatacgtcatggtaaattagcagttaattagcatattagcaattgggcgtacctcatcaggattgctcttgtagatgtgtgtggtgatgtttcttgttcaattcatgttctgctttaaaagtatgtgttctctgtttgttaattaagattcatggttataatgatttggacctaattaatcagggttgcccttttagatgcgtggttacttgttgagttcatttttttcctgctatagttgtatgcgtttgttcattcatggttagatttgatttgtttcttctctattccatgccttccatatacttcaattgtagcttaacatgagatttctgtatatgcaggtcgaccgccggggatccacacgacaccatggcccagtccaagcacggcctgaccaaggagatgaccatgaagtaccgcatggagggctgcgtggacggccacaagttcgtgatcaccggcgagggcatcggctaccccttcaagggcaagcaggccatcaacctgtgcgtggtggagggcggccccttgcccttcgccgaggacatcttgtccgccgccttcatgtacggcaaccgcgtgttcaccgagtacccccaggacatcgtcgactacttcaagaactcctgccccgccggctacacctgggaccgctccttcctgttcgaggacggcgccgtgtgcatctgcaacgccgacatcaccgtgagcgtggaggagaactgcatgtaccacgagtccaagttctacggcgtgaacttccccgccgacggccccgtgatgaagaagatgaccgacaactgggagccctcctgcgagaagatcatccccgtgcccaagcagggcatcttgaagggcgacgtgagcatgtacctgctgctgaaggacggtggccgcttgcgctgccagttcgacaccgtgtacaaggccaagtccgtgccccgcaagatgcccgactggcacttcatccagcacaagctgacccgcgaggaccgcagcgacgccaagaaccagaagtggcacctgaccgagcacgccatcgcctccggctccgccttgccctccggactcagatctcgatagagtcaacctagacttgtccatcttctggattggccaacttaattaatgtatgaaataaaaggatgcacacatagtgacatgctaatcactataatgtgggcatcaaagttgtgtgttatgtgtaattactagttatctgaataaaagagaaagagatcatccatatttcttatcctaaatgaatgtcacgtgtctttataattctttgatgaaccagatgcatttcattaaccaaatccatatacatataaatattaatcatatataattaatatcaattgggttagcaaaacaaatctagtctaggtgtgttttgcgaattgcggcgcccttactttaacgcctctaaccaacacccctttatctttataaggaacaataaacagaatttgccccactgttctaaatcacctaataatatccccagctaaaaacaataaaggtttcctagaattaagacaagcatgactgttcctccaggagggtttggaacattgttgcagtcttgcagatacgggcgaagggtgagaaacagagcggagggctggaggtgacctcggtagtcgacgccggagttgagcttgacaacgacggggcggcccctgatggacttgaggaagtccgatggcgtcttcaccgtcccgccggcgcccgaggcgggcctgtcgctgccgccgccgccgctgctcatcttgcgcgctgtgcccccggcggtgtccctgtgttgcggatcgcgggtgggccaggtggatgcgagggcgacccgtttggactccggccggagccgccggatccctggtcggtgtcagtgccgtttactctgggccccacgtgtcagtaccgtctgtagatgacaacaacccgtcgtccacagtcatgtccaaaatatcctttcttcttttttttcgattcggatatctatcttccttttttttttccaaaaatcttcttgacgcaccagcgcgcacgtttgtggtaaacgccgacacgtcggtcccacgtcgatagaccccacccaccagtgagtagcgtgtacgtattcgggggtgacggacgtgtcgccgtcgtcttgctagtcccattcccatctgagccacacatctctgaacaaaaaaaaggagggaggcctccacgcacatccccctccgtgccacccgccccaaaccctcgcgccgcctccgagacagccgccgcaaccatggccaccgccgccgccgcgtctaccgcgctcactggcgccactaccgctgcgcccaaggcgaggcgccgggcgcacctcctggccacccgccgcgccctcgccgcgcccatcaggtgctcagcggcgtcacccgccatgccgatggctcccccggccaccccgctccggccgtggggccccaccgagccccgcaagggtgctgacatcctcgtcgagtccctcgagcgctgcggcgtccgcgacgtcttcgcctaccccggcggcgcgtccatggagatccaccaggcactcacccgctcccccgtcatcgccaaccacctcttccgccacgagcaaggggaggcctttgccgcctccggctacgcgcgctcctcgggccgcgtcggcgtctgcatcgccacctccggccccggcgccaccaacctagtctccgcgctcgccgacgcgctgctcgattccgtccccatggtcgccatcacgggacaggtggcgcgacgcatgattggcaccgacgccttccaggagacgcccatcgtcgaggtcacccgctccatcaccaagcacaactacctggtcctcgacgtcgacgacatcccccgcgtcgtgcaggaggctttcttcctcgcctcctctggtcgaccagggccggtgcttgtcgacatccccaaggacatccagcagcagatggcggtgcctgtctgggacaagcccatgagtctgcctgggtacattgcgcgccttcccaagccccctgcgactgagttgcttgagcaggtgctgcgtcttgttggtgaatcgcggcgccctgttctttatgtgggcggtggctgcgcagcatctggtgaggagttgcgacgctttgtggagctgactggaatcccggtcacaactactcttatgggcctcggcaacttccccagcgacgacccactgtctctgcgcatgctaggtatgcatgggacggtgtatgcaaattatgcagtggataaggccgatctgttgcttgcacttggtgtgcggtttgatgatcgcgtgacagggaagattgaggcttttgcaagcagggctaagattgtgcacgttgatattgatccggctgagattggcaagaacaagcagccacatgtgtccatctgtgcagatgttaagcttgctttgcagggcatgaatgctcttcttgaaggaagcacatcaaagaagagctttgactttggctcatggaacgatgagttggatcagcagaagagggaattcccccttgggtataaaacatctaatgaggagatccagccacaatatgctattcaggttcttgatgagctgacgaaaggcgaggccatcatcggcacaggtgttgggcagcaccagatgtgggcggcacagtactacacttacaagcggccaaggcagtggttgtcttcagctggtcttggggctatgggatttggtttgccggctgctgctggtgcttctgtggcaaacccaggtgtcactgttgttgacatcgatggagatggtagctttctcatgaacgttcaggagctagctatgatccgaattgagaacctcccagtgaaggtctttgtgctaaacaaccagcacctggggatggtggtgcagttggaggacaggttctataaggccaacagagcgcacacatacttgggaaacccagagaatgaaagtgagatatatccagatttcgtgacgatcgccaaagggttcaacattccagcggtccgtgtgacaaagaagaacgaagtccgcgcagcgataaagaagatgctcgagactccagggccgtacctcttggatataatcgtcccacaccaggagcatgtgttgcctatgatccctagtggtggggctttcaaggatatgatcctggatggtgatggcaggactgtgtactgactagctagtcagttaacagatctgccagatcctcggtgtacaaataacccgtcttatcctatgagacgggccggcgtcagtgtgttctggaggaatttttatgtcagagcctttttctttgtgtgcttgatgtagatgccaagggaagcttattggctgttgaagcttgatgcaaaataaattatggaactctgttttttgtttatctaataataactagcaaatatgcttccattgcattgaaactaacagccttttgtgtttccaagttttattttgtgacaatgtcatctatttcaattagttgtggaatcggaaacttgcaggactaacttggaaactccaatccctcagcatcctggactttttcctggtgtaatccatgtagatattattttaatcatcattttagttctggaggtttttccatctccggttttgctcccctttcttcaaaaaaaaaaaaaaaatgccgtaggcgccgcaacgcccacctgttgttcaaactcatgggcacgagtggctcgaagattttatacaacaattgctgtagtttcaccgttgctggtgaagaagcatttttttaaaaaaatatagtggtattcattttaattagtttagttgtgcagcgagcaaaatttggacatgctctgctcggaatctgatcgacctagacacagattagcagcagtagctttgtcatctgttccaagagttgcgatctgatagaagaaaaaaaaaccttcccttcaatgtaaaaccgaaactaacaagaaagaagcacagtgccgtttaggcaagtatggagtacgtattaagcatgtagaaggccatgcatgaaccactaacaagaaagaagcgcagtgccattcaggcaagcataagcatgtagattggcatgcatgaacaactaacagtagatcgtctctggtctgattagaagttttttgggaagccaagaaatcatgtacaactggttccatctcaaattccgtggcaaaaagaggcctaagcaacatacctcgagtagatcacattcaagcttggtcacccggtccgtcaatattctgattccgatgacttcgtaggttcctagctcaagccgctcgtgtccaagcgtcacttacgattagctaatgattacggcatctaggaccgactagtggcgcgccgactagctagctaaggtaccgagctcgaattcattccgattaatcgtggcctcttgctcttcaggatgaagagctatgtttaaacgtgcaagcgctactagacaattcagtacattaaaaacgtccgcaatgtgttattaagttgtctaagcgtcaatttgtttacaccacaatatatcctgcca

SEQ ID NO: 272 - DNA, 20976 bp, Artificial Sequence
  PHP100056
gtttacccgccaatatatcctgtcaaacactgcggccgcacttgaccgcggatggagccggagctgtggtgaggccatcgacgggaggtgggggagaacacagtctcagtgttctttgtgagtccgcaaggtttttagcttttctgtattaattaaggttgctgttggctgtagaatacggtcgtggaagagctgtatcggtagctactacgtaagctattatatactggaagtctggagctcgtcgatctccggtcgtcttcctccatttctcctcgtcttgctttgactgctgctaccatttgcttctgttttctgatgaagcatgccatgtcggccaccagtgtttgtgtggtttttgcagggaatggctttcaagtgctgtgattgaatggccctcgtcgtcctcggctgagctcacatggacgcgtcatgtgagtgagatatatgatcatatgatgagtggggttcgggtgagtgcgtacttgaagtaggatcccgctttcactcattcattcattggcctttaaaccgggaaattttcgcgaggagatggagggaagcaagcagggtgacgagtgcagagtgccgcgagcgctttgtcaaaaggcaccgccgtaggcaaaaaaatcaatggccctgactgactcgatggtagtactactgtagagactagagagggttgctccccatatcttcgtgtgacttttactccagcattgcatttccgtcattgagacgttaattaatagcagctttcgggacagatgactgtggccatgtttcgtcacggccgcttcgtgccagctgggggtactatagtactgtgattttgttagtaaaaactttcattaggccaccattgacgaccgggccttcgcttttgctgcgctaattaaccatttcccggcgaccgaagggaacatgaacatgccccgacacatgagggcatgaggactagtgttctccctgtcgttcgttgacttgactagtgatagtttaaacgctcttcaactggaagagcggttactaccggttcactagctagctgctaatcgagctagttaccctatgaggtgacatgaagcgctcacggttactatgacggttagcttcacgactgttggtggcagtagcgtacgacttagctatagttccggacttacccttaagataacttcgtatagcatacattatacgaagttatgggcccacgcgtgaagagcggttaccagagctggtcacctttgtccaccaagatggaactgtcttcggccagaatggccatctggattcagcaggcctagaaggccatttatcgctatcaactttgtatagaaaagttgggccgaattcgagctcggtacggccagaatggcccggaccgaagcttgcggccgcacactgatagtttaaactgaaggcgggaaacgacaatctgatcatgagcggagaattaagggagtcacgttatgacccccgccgatgacgcgggacaagccgttttacgtttggaactgacagaaccgcaacgttgaaggagccactcagccgcgggtttctggagtttaatgagctaagcacatacgtcagaaaccattattgcgcgttcaaaagtcgcctaaggtcactatcagctagcaaatatttcttgtcaaaaatgctccactgacgttccataaattcccctcggtatccaattagagtctcatattcactctcccgggggatctcgactctagaggatcgctcaggaaggccgctgagatagaggcatggcggccaatgcgggcggcggtggagcgggaggaggcagcggcagcggcagcgtggctgcgccggcggtgtgccgccccagcggctcgcggtggacgccgacgccggagcagatcaggatgctgaaggagctctactacggctgcggcatccggtcgcccagctcggagcagatccagcgcatcaccgccatgctgcggcagcacggcaagatcgagggcaagaacgtcttctactggttccagaaccacaaggcccgcgagcgccagaagcgccgcctcaccagcctcgacgtcaacgtgcccgccgccggcgcggccgacgccaccaccagccaactcggcgtcctctcgctgtcgtcgccgccgccttcaggcgcggcgcctccctcgcccaccctcggcttctacgccgccggcaatggcggcggatcggctgtgctgctggacacgagttccgactggggcagcagcggcgctgccatggccaccgagacatgcttcctgcaggactacatgggcgtgacggacacgggcagctcgtcgcagtggccacgcttctcgtcgtcggacacgataatggcggcggccgcggcgcgggcggcgacgacgcgggcgcccgagacgctccctctcttcccgacctgcggcgacgacggcggcagcggtagcagcagctacttgccgttctggggtgccgcgtccacaactgccggcgccacttcttccgttgcgatccagcagcaacaccagctgcaggagcagtacagcttttacagcaacagcaacagcacccagctggccggcaccggcaaccaagacgtatcggcaacagcagcagcagccgccgccctggagctgagcctcagctcatggtgctccccttaccctgctgcagggagtatgtgagagcaacgcgagctgccactgctcttcactgatgtctctggaatggaaggaggaggaagtgagcatagcgttggtgcgttgctgtcaagggcgaattcacatggttaacctagacttgtccatcttctggattggccaacttaattaatgtatgaaataaaaggatgcacacatagtgacatgctaatcactataatgtgggcatcaaagttgtgtgttatgtgtaattactagttatctgaataaaagagaaagagatcatccatatttcttatcctaaatgaatgtcacgtgtctttataattctttgatgaaccagatgcatttcattaaccaaatccatatacatataaatattaatcatatataattaatatcaattgggttagcaaaacaaatctagtctaggtgtgttttgcgaatgcggccgccaccgcggtggagctcgaattccggtccgggcctagaaggccagcttcaagtttgtacaaaaaagcaggctccggccagaatggcccggaccgtcactgactagctaaacagcggccgcatcgagcagctggcttgtggggaccagacaaaaaaggaatggtgcagaattgttaggcgcacctaccaaaagcatctttgcctttattgcaaagataaagcagattcctctagtacaagtggggaacaaaataacgtggaaaagagctgtcctgacagcccactcactaatgcgtatgacgaacgcagtgacgaccacaaaactcgagcaacgagatcatgagccaatcaaagaggagtgatgtagacctaaagcaataatggagccatgacgtaagggcttacgcccatacgaaataattaaaggctgatgtgacctgtcggtctctcagaacctttactttttatgtttggcgtgtatttttaaatttccacggcaatgacgatgtgaccgtcgacccactaaaacattgctttgtcaaaagctaaaaaagatgatgcccgacagccacttgtgtgaagcatgagaagccggtccctccactaagaaaattagtgaagcatcttccagtggtccctccactcacagctcaatcagtgagcaacaggacgaaggaaatgacgtaagccatgacgtctaatcccagggcccggtgaccaatcgaattagcttggcgcgtggaccgaagcttgcatgcctgcaatttaaatgccttcagttggttttgctcctttttatttaaaccctttcttggactttttattggtttgtgttgaacctttggcacctgtagaacttataatctagagcaaactagttagtccaattatttgtgttgggcaattcaaccaccaaaattatttaggaaaaggtttgagcctatttccctttcagccgccacccttgccgtcgtcgtcgccattgttgccatcgtcctcgttgcatgctcacgatgaggttgtacctgatggatcgcgcagagcatgctcacgatgaggttgaggtatggcgtgttctgtacgacttcatcctctgtcaatgctcttgcgtcaccttccatcatgcgtgggcatgcaccaggtatggcgtgttgtcatgtactttctggtacattggttgttactatggaggctttgttgctgtggtctcccttggtactgcatacatggcctaaacacggttgggtgatgttgtgtcttgtcgcggaagtcgtggatcgatggtgtctgtctgggttccctccttgcgggttcgcgtggcggggactcgatcgtccgtcctgcctcgtaggcttgcctgacgaggacttggtcgttcgtcctgcctcgcaggcttgctcggcgaggacttggtcgttcctcccacctcgcggacttgctcggcaaatgggtcgtggagagtatgggcctcactatgggcaccccatttcctggtacccgacatagtgactaaaagtgactaaaatgagctttttaccccaccacctgccctcccccacgtgagctatgcgctgaacgagcaaagaagtaaataggggtaatgcagtaaatatacgtagtagttaatgctctttagtcagatttagtcactgacaccaaacgagatactttagtgactactaaagtttagtcaggtgactaaagaaaccaaacataacccttagtgtgaaccgatttaggcacactagcatatatcccgtgttaacgctacgatcttgaagagggaggagtcaacgacggcggtggcgcaagtggataagttgacgacagcgacgatgacaatgtgagtgaggagaagggggcagtggggacgcagaggatggaagagggggagggggtggataggggcagcagggtgggaggagggagagcgcgagtgagggagagagggcgccgggacgcatgggaagaggaagagatgaatcaaataatattatatattaaatttgagtaagtaagagagatttatctaacgatccgaattgttggttttgatgatctgttaagtttaggtgtaatttgtttgatggatttagtgatgattatatgtgtgggggtgatttagtttggttggttttacaaaagtttaaattttttttagattatatagtggtatagatagtcaaacagtagcggcaatgacatcacggtaaatgcgcgttggcatccaaatgcagctggacacaggtcacacagcctaacggatatatcatatatgtgaatcctaactgtacactgtctgaagtggacgaacggctctggcttcggcgtgttacgtgtatagtaggccccttttgaacgaacggcgcgggccggggccaccaccagcatctgcggcagggagaatcgcgttggttcgacgcaaacgctacccggcgcccccttgcccttggggccggctattttaccgcacccgttctcccctctctaccgcagatcagatcacactcgtagagagaaggaaaaatatccccaaaccctagctcccgatctcgggatccatggccactgtgaacaactggctcgctttctccctctccccgcaggagctgccgccctcccagacgacggactccacactcatctcggccgccaccgccgaccatgtctccggcgatgtctgcttcaacatcccccaagattggagcatgaggggatcagagctttcggcgctcgtcgcggagccgaagctggaggacttcctcggcggcatctccttctccgagcagcatcacaaggccaactgcaacatgatacccagcactagcagcacagtttgctacgcgagctcaggtgctagcaccggctaccatcaccagctgtaccaccagcccaccagctcagcgctccacttcgcggactccgtaatggtggcttcctcggccggtgtccacgacggcggtgccatgctcagcgcggccgccgctaacggtgtcgctggcgctgccagtgccaacggcggcggcatcgggctgtccatgattaagaactggctgcggagccaaccggcgcccatgcagccgagggtggcggcggctgagggcgcgcaggggctctctttgtccatgaacatggcggggacgacccaaggcgctgctggcatgccacttctcgctggagagcgcgcacgggcgcccgagagtgtatcgacgtcagcacagggtggagccgtcgtcgtcacggcgccgaaggaggatagcggtggcagcggtgttgccggcgctctagtagccgtgagcacggacacgggtggcagcggcggcgcgtcggctgacaacacggcaaggaagacggtggacacgttcgggcagcgcacgtcgatttaccgtggcgtgacaaggcatagatggactgggagatatgaggcacatctttgggataacagttgcagaagggaagggcaaactcgtaagggtcgtcaagtctatttaggtggctatgataaagaggagaaagctgctagggcttatgatcttgctgctctgaagtactggggtgccacaacaacaacaaattttccagtgagtaactacgaaaaggagctcgaggacatgaagcacatgacaaggcaggagtttgtagcgtctctgagaaggaagagcagtggtttctccagaggtgcatccatttacaggggagtgactaggcatcaccaacatggaagatggcaagcacggattggacgagttgcagggaacaaggatctttacttgggcaccttcagcacccaggaggaggcagcggaggcgtacgacatcgcggcgatcaagttccgcggcctcaacgccgtcaccaacttcgacatgagccgctacgacgtgaagagcatcctggacagcagcgccctccccatcggcagcgccgccaagcgcctcaaggaggccgaggccgcagcgtccgcgcagcaccaccacgccggcgtggtgagctacgacgtcggccgcatcgcctcgcagctcggcgacggcggagccctggcggcggcgtacggcgcgcactaccacggcgccgcctggccgaccatcgcgttccagccgggcgccgccagcacaggcctgtaccacccgtacgcgcagcagccaatgcgcggcggcgggtggtgcaagcaggagcaggaccacgcggtgatcgcggccgcgcacagcctgcaggacctccaccacctgaacctgggcgcggccggcgcgcacgactttttctcggcagggcagcaggccgccgccgctgcgatgcacggcctgggtagcatcgacagtgcgtcgctcgagcacagcaccggctccaactccgtcgtctacaacggcggggtcggcgacagcaacggcgccagcgccgtcggcggcagtggcggtggctacatgatgccgatgagcgctgccggagcaaccactacatcggcaatggtgagccacgagcaggtgcatgcacgggcctacgacgaagccaagcaggctgctcagatggggtacgagagctacctggtgaacgcggagaacaatggtggcggaaggatgtctgcatgggggactgtcgtgtctgcagccgcggcggcagcagcaagcagcaacgacaacatggccgccgacgtcgggcatggcggcgcgcagctcttcagtgtctggaacgacacttaagcgtacgtgccggcctggctctccgaaagggcgtattccagcacactggcggccgttactagacccaacctagacttgtccatcttctggattggccaacttaattaatgtatgaaataaaaggatgcacacatagtgacatgctaatcactataatgtgggcatcaaagttgtgtgttatgtgtaattactagttatctgaataaaagagaaagagatcatccatatttcttatcctaaatgaatgtcacgtgtctttataattctttgatgaaccagatgcatttcattaaccaaatccatatacatataaatattaatcatatataattaatatcaattgggttagcaaaacaaatctagtctaggtgtgttttgcgaatgcggcctccgggcacccagctttcttgtacaaagtggccgttaacggatcggccagaatggcccggaccgggttaccccgcggttcaaagccaatgactgttgttaggtccagtttctaaggacgaatcatccaatcactggttctttctgaacaaaacaaagagctatagagttacgttactgtagccgagacagagcctgcaatctggttatgccacatactaggttctttcttaaagttgactcactctatcctaagttctacttacaaggagctacaacaaattggtcataaccggagagcgttcaaggaggtaatatcccatcttactctgtagcaaggctacaaaaggagagctaaagaactaggctacaaaaagagagctaaagaactaactatctagcaagactacagagctatagtgtagagatttcataaccggtgagcgttcaaggatactttgaagagaagaggtaatatctcaactagcaagactacaaaaaaatggagatataaaactaactgtctaacaagactacagagctatagtagagatagatacgttcgacacttaagcatgagaattcgagctcggtaccctggttcacaaactcaatacaacacacagtggagtagggtattacgctccggcggcccgaaccactctaaatccttgtgtcctcgtgtgctcttccaccattaatgactgtaattgcagggacacgaagagttgtagcgcttttgccaacaagatccgctatatgctagtagagtggaacctgcacagcaacaagcatccaataatctgagaataagaattatgtgtggtgatggttctcatctctgcaactcgccattttcgcgagagaaccaaatccaagttggtgaagatcatgatttgggctcatgggctggcatagtagctattacctttgcaattgtggttcgaatctatccgatattctccttttcagggagagctaatgcttatgcttattgggtattttggtttgacactgcttcacgcccaaaaaaaggcaactatgtctgagttggatatggcccaaaaaaaggcagctatgtctgagttggatatggaagtcttctttcgtttagggtgaagtaagaccaagctcatgagcttattatcttaggtcggaacaaattagttgataggcatggcacatttatcaaattataatgattttaacagaaaagcaacacctctttttcagcagcaccagctttgcaagctgcaattgacactccaagcatagtatttgctccaaactcagcctgcatttcgcacaatatcatatctatttccatttggataaaatatattttccagaaatatgggaacagaatcaagatacagaaaaaagttgtggtagtagtggtaagtggaaacacaagtacagtgaaaagatagcattatttctgaacagtcaaattaaccgaaataagtagtatcacatactgcccctaaattgactacacccaatgtaaagaattgcttgagcatattgagccatcagttgtttgtttgtgtaacggatttgacaatgcagagttcaggagcaaaaaaccgcaaaggagagaaagagggaaaggatctcctagtatcccaccttgtggcgcgccctgtcaagtgcatgatggcctggtcgatctgcgtctgctgctgcggttccatcccaacgagtgcctccgacaccttgtcgttgatcacccgcaccgcgtaggcgacccccctggcgaggaacttccgcctctcggaggccccggccgcgtcggcggcggcgccctcgagcgcgcccacgctagccgtagatgctcggtgcacggccttgttggtgtgcaactcgacctcaacggccggtgcgctacgcccgtcaaggatctggcgcgcccgcaccctcgtgatcacggtgggcgcctcccgcctcatgtggccgacgatgaaaagcgccgggttaggggccttggcgcgcaccgccgtattcagggcctcctcgctcttgcgcgagagcaggtgcttccccaggtactcctgcactgacaaggctgccacagcggtggaatttgtcctcacgacttcgccacgtcgtcctcacctccctggcttcccacgactccgccgtatcgaggtgctcggtgggtcgtcttaatccgaagtccgaactaggaagacgagacagagaggtctgaggaatgggcctcgtttgatgttgagctgaattatttttccagcataagcccaggtcttggtccatgaacaaaattactagaaacccagcccagtactacgatctaaaagagggactgccactggatagctctctctagcattctccacgctccaatacagcggcgtcgtgtctatccgggtctatccgcgaacacgtgagaactctccagaaactgctttctcctccacttcatctctctcgctttccctctataaaaagaccccttctaggaattgagggagacagcaagcaccaagcagcgatccgaagctcaatcaattcactcaaacctcttccccaaatcttcgattagatcttcgttgacaagaagactagaaccgaacctgacatgtccaacctgctcacggttcaccagaaccttccggctcttccagtggacgcgacgtccgatgaagtcaggaagaacctcatggacatgttccgcgacaggcaagcgttcagcgagcacacctggaagatgctgctctccgtctgccgctcctgggctgcatggtgcaagctgaacaacaggaagtggttccccgctgagcccgaggacgtgagggattaccttctgtacctgcaagcgcgaggtttgtttctgcttctacctttgatatatatataataattatcattaattagtagtaatataatatttcaaatatttttttcaaaataaaagaatgtagtatatagcaattgcttttctgtagtttataagtgtgtatattttaatttataacttttctaatatatgaccaaaacatggtgatgcctaggtctggcagtgaagaccatccagcaacaccttggacaactgaacatgcttcacaggcgctccggcctcccgcgccccagcgactcgaacgccgtgagcctcgtcatgcgccgcatcaggaaggaaaacgtcgatgccggcgaaagggcaaagcaggccctcgcgttcgagaggaccgatttcgaccaggtccgcagcctgatggagaacagcgacaggtgccaggacattaggaacctggcgttcctcggaattgcatacaacacgctcctcaggatcgcggaaattgcccgcattcgcgtgaaggacattagccgcaccgacggcggcaggatgcttatccacattggcaggaccaagacgctcgtttccaccgcaggcgtcgaaaaggccctcagcctcggagtgaccaagctcgtcgaacgctggatctccgtgtccggcgtcgcggacgacccaaacaactacctcttctgccgcgtccgcaagaacggggtggctgcccctagcgccaccagccaactcagcacgagggccttggaaggtattttcgaggccacccaccgcctgatctacggcgcgaaggatgacagcggtcaacgctacctcgcatggtccgggcactccgcccgcgttggagctgctagggacatggcccgcgccggtgtttccatccccgaaatcatgcaggcgggtggatggacgaacgtgaacattgtcatgaactacattcgcaaccttgacagcgagacgggcgcaatggttcgcctcctggaagatggtgactgaggtacccaacctagacttgtccatcttctggattggccaacttaattaatgtatgaaataaaaggatgcacacatagtgacatgctaatcactataatgtgggcatcaaagttgtgtgttatgtgtaattactagttatctgaataaaagagaaagagatcatccatatttcttatcctaaatgaatgtcacgtgtctttataattctttgatgaaccagatgcatttcattaaccaaatccatatacatataaatattaatcatatataattaatatcaattgggttagcaaaacaaatctagtctaggtgtgttttgcgatccgatatcgaattggccacggtaccagctgctgctgttctagggttcacaagtctgcctatttgtcttccccaatggagctatggttgtctggtctggtccttggtcgtgtcccgtttcattgtgtactatttacctgtaatgtgtatccttaagtctggtttgatggtgtctgaaacgttttgctgtggtagagcagcatggaagaactataatgaataagtgatccctaatcattgtgtccaaattttgcttctgctatacccttttgtgctgtttcttatgttttgcttaaaaatttgatctgacaaacaaatttgtctaaattatgctcttgttctgactgtgtactgtacacatttgtattgctaccggtttggcacatagttttctctttgattgcagatcaaacccttctgattgcagattgcttggctatggctgatgtgctcactgttcttctttagcttgtatattgctgatggtggcttggctacggctgaaaaagttgctgctgcgccgacttggcaactgttgctccagtaatgctttgtcctctcttcctagccgccgacttggcacttggcagctgttgctcctgtaatgcgttgttatctcttatctcttgagatgtactatgattttgaggctgtttgacttgtgccagattgccagtgctgatgctatattatctcaggtttttatgctagtatatgttttactgtgtgctgcctgtgtcgagttacgtaatctattgaaccgctatgcgtgttgatgccctgttgttgcttgccagattgatgcccctgttgcttgcagcttgcaagctgtagtgaaatcctaaaattccaaaccaaatctattctgaacttttgaagatctgtgatgtccggaagaaaagattcaaacagataaacgggactctccagaatctataaaataaatgatcgacaaacgctttgctttggtaggcttcaagcttggtcacccggtccgggcctagaaggccagcttcggccgccccgggcaactttattatacaaagttgatagataaatcagatatctggttcctaaggacccggcggaccgattaaactgattcggtccgacgcgttacctaataacttcgtatagcatacattatacgaagttattagctaactaactagtaagcttaagccatgggtcgacggatccgttaactagcgtggcatttggcaccgccgcacactatgcgagctaggagtgctagtttacagatgaaactatgaaaccaagaaaacacaattgtccgtagctagcgcgtggcgtcgtgtcaagcttcacacagtatcttcgttcttcactataaatcgcgcctgttgttcgtgagacccaccaccgtggataacagtcccctaataataagcgatcaacagcactgctgatggctgaacaccgaggcgccgccgcgcgtaaccatccgccggagcagcccgtcgtgccggcgaacgacgccttccccgaccgcgcccagcagctctgcctcgacgccgggcgcgcgctcgcgatgtgcggcgtgctcgtcgccgtccctcccgcattttacgcgtcgacgtcgcggacgacaccgcacttgccttcgtcggcttcgtcctctggatcatcggtgcgtggctgtgcctcctggcgctcacgcccttggctccacgggcggtgagggcgggcggggccgccgccagcaccttgctgatcaggtgcctgtccctttcatgaactactagcgcccgcgcccgcggccgccgggcacaagagaacacatcgatgttcgctgcgtacgtcagcaataaggcactctttgtcagtagtcgagtgcatatgttgggtgtttgccctgggagatttcaagtgttgtggccattatcccgcaggataaaaaatcggcggcttttggattgatacggaaaataacgatgtttcatgctcgtgttgtgtgtgtgacatcttgtcagccaagtttttaaccgttgctactccccctctgtgggctcagtgtgtggaccggaatacgtcgtacataggccgtagcctaagcccaatatgccgtttttcaggttggcctgtgtgacgacaagcgggtctcaaaagcccatcacgcaactggcctgcaattattggaggagagcgcgtcgagttggttccagaggctgcgtggtggggccggactctgcgacgacctctcgttcgcgtccgatttggttgccgtgagccgtgacgtaacgcctccttccgttcctccctatataagttccacccccgggtccggtttccccaagccccagtgacccccgatcccgatcgcgaaatctccgcacccgccggcaagggaccgaagcaagcctctctcccgaccgtcgcatcaaggtacgcgtccgctcgatctgtcctcttccttctcgatttgacttgctgtggtgcccgatcacgggatcagaatcgcaccagtgtagatttcgcatgttctaagatgtgttagtttccaggctaatccagttctcttgacgcccgatccgatcgagctccgtgtttatttcagcctaatcgtagtattcccctaaaatttcctcattagggggttcgcaagattgttggtcgacaggttcacttatgctcgatcgcttacttttagtcgattcatgctgcgtactattgttgccccccgtggttttatcttttctcgtgtgaaatccagtagatatagtagatatcgtagcattaggttttaattcaatcgattgattattgtatcatcaaaattgagaagttcgaatcatgcctatcatgctgcctcaaccgaaatcctgtatattgaagtttcaattcaattgattgatcattcattagattcaaccaaaatctagaaggttagatgacgcatgtcatgctgcctgcgtagtttacctttgatctgtttatgattaccttatcagtaggatatttgtgattttgggaagtagcactaactgattcatgctgacatgatgttccctttcagattatactgttgagtcctatctaattgatgctttgtatgctatatgaatacgtcatggtaaattagcagttaattagcatattagcaattgggcgtacctcatcaggattgctcttgtagatgtgtgtggtgatgtttcttgttcaattcatgttctgctttaaaagtatgtgttctctgtttgttaattaagattcatggttataatgatttggacctaattaatcagggttgcccttttagatgcgtggttacttgttgagttcatttttttcctgctatagttgtatgcgtttgttcattcatggttagatttgatttgtttcttctctattccatgccttccatatacttcaattgtagcttaacatgagatttctgtatatgcaggtcgaccgccggggatccacacgacaccatggcccagtccaagcacggcctgaccaaggagatgaccatgaagtaccgcatggagggctgcgtggacggccacaagttcgtgatcaccggcgagggcatcggctaccccttcaagggcaagcaggccatcaacctgtgcgtggtggagggcggccccttgcccttcgccgaggacatcttgtccgccgccttcatgtacggcaaccgcgtgttcaccgagtacccccaggacatcgtcgactacttcaagaactcctgccccgccggctacacctgggaccgctccttcctgttcgaggacggcgccgtgtgcatctgcaacgccgacatcaccgtgagcgtggaggagaactgcatgtaccacgagtccaagttctacggcgtgaacttccccgccgacggccccgtgatgaagaagatgaccgacaactgggagccctcctgcgagaagatcatccccgtgcccaagcagggcatcttgaagggcgacgtgagcatgtacctgctgctgaaggacggtggccgcttgcgctgccagttcgacaccgtgtacaaggccaagtccgtgccccgcaagatgcccgactggcacttcatccagcacaagctgacccgcgaggaccgcagcgacgccaagaaccagaagtggcacctgaccgagcacgccatcgcctccggctccgccttgccctccggactcagatctcgatagagtcaacctagacttgtccatcttctggattggccaacttaattaatgtatgaaataaaaggatgcacacatagtgacatgctaatcactataatgtgggcatcaaagttgtgtgttatgtgtaattactagttatctgaataaaagagaaagagatcatccatatttcttatcctaaatgaatgtcacgtgtctttataattctttgatgaaccagatgcatttcattaaccaaatccatatacatataaatattaatcatatataattaatatcaattgggttagcaaaacaaatctagtctaggtgtgttttgcgaattgcggcgcccttactttaacgcctctaaccaacacccctttatctttataaggaacaataaacagaatttgccccactgttctaaatcacctaataatatccccagctaaaaacaataaaggtttcctagaattaagacaagcatgactgttcctccaggagggtttggaacattgttgcagtcttgcagatacgggcgaagggtgagaaacagagcggagggctggaggtgacctcggtagtcgacgccggagttgagcttgacaacgacggggcggcccctgatggacttgaggaagtccgatggcgtcttcaccgtcccgccggcgcccgaggcgggcctgtcgctgccgccgccgccgctgctcatcttgcgcgctgtgcccccggcggtgtccctgtgttgcggatcgcgggtgggccaggtggatgcgagggcgacccgtttggactccggccggagccgccggatccctggtcggtgtcagtgccgtttactctgggccccacgtgtcagtaccgtctgtagatgacaacaacccgtcgtccacagtcatgtccaaaatatcctttcttcttttttttcgattcggatatctatcttccttttttttttccaaaaatcttcttgacgcaccagcgcgcacgtttgtggtaaacgccgacacgtcggtcccacgtcgatagaccccacccaccagtgagtagcgtgtacgtattcgggggtgacggacgtgtcgccgtcgtcttgctagtcccattcccatctgagccacacatctctgaacaaaaaaaaggagggaggcctccacgcacatccccctccgtgccacccgccccaaaccctcgcgccgcctccgagacagccgccgcaaccatggccaccgccgccgccgcgtctaccgcgctcactggcgccactaccgctgcgcccaaggcgaggcgccgggcgcacctcctggccacccgccgcgccctcgccgcgcccatcaggtgctcagcggcgtcacccgccatgccgatggctcccccggccaccccgctccggccgtggggccccaccgagccccgcaagggtgctgacatcctcgtcgagtccctcgagcgctgcggcgtccgcgacgtcttcgcctaccccggcggcgcgtccatggagatccaccaggcactcacccgctcccccgtcatcgccaaccacctcttccgccacgagcaaggggaggcctttgccgcctccggctacgcgcgctcctcgggccgcgtcggcgtctgcatcgccacctccggccccggcgccaccaacctagtctccgcgctcgccgacgcgctgctcgattccgtccccatggtcgccatcacgggacaggtggcgcgacgcatgattggcaccgacgccttccaggagacgcccatcgtcgaggtcacccgctccatcaccaagcacaactacctggtcctcgacgtcgacgacatcccccgcgtcgtgcaggaggctttcttcctcgcctcctctggtcgaccagggccggtgcttgtcgacatccccaaggacatccagcagcagatggcggtgcctgtctgggacaagcccatgagtctgcctgggtacattgcgcgccttcccaagccccctgcgactgagttgcttgagcaggtgctgcgtcttgttggtgaatcgcggcgccctgttctttatgtgggcggtggctgcgcagcatctggtgaggagttgcgacgctttgtggagctgactggaatcccggtcacaactactcttatgggcctcggcaacttccccagcgacgacccactgtctctgcgcatgctaggtatgcatgggacggtgtatgcaaattatgcagtggataaggccgatctgttgcttgcacttggtgtgcggtttgatgatcgcgtgacagggaagattgaggcttttgcaagcagggctaagattgtgcacgttgatattgatccggctgagattggcaagaacaagcagccacatgtgtccatctgtgcagatgttaagcttgctttgcagggcatgaatgctcttcttgaaggaagcacatcaaagaagagctttgactttggctcatggaacgatgagttggatcagcagaagagggaattcccccttgggtataaaacatctaatgaggagatccagccacaatatgctattcaggttcttgatgagctgacgaaaggcgaggccatcatcggcacaggtgttgggcagcaccagatgtgggcggcacagtactacacttacaagcggccaaggcagtggttgtcttcagctggtcttggggctatgggatttggtttgccggctgctgctggtgcttctgtggcaaacccaggtgtcactgttgttgacatcgatggagatggtagctttctcatgaacgttcaggagctagctatgatccgaattgagaacctcccagtgaaggtctttgtgctaaacaaccagcacctggggatggtggtgcagttggaggacaggttctataaggccaacagagcgcacacatacttgggaaacccagagaatgaaagtgagatatatccagatttcgtgacgatcgccaaagggttcaacattccagcggtccgtgtgacaaagaagaacgaagtccgcgcagcgataaagaagatgctcgagactccagggccgtacctcttggatataatcgtcccacaccaggagcatgtgttgcctatgatccctagtggtggggctttcaaggatatgatcctggatggtgatggcaggactgtgtactgactagctagtcagttaacagatctgccagatcctcggtgtacaaataacccgtcttatcctatgagacgggccggcgtcagtgtgttctggaggaatttttatgtcagagcctttttctttgtgtgcttgatgtagatgccaagggaagcttattggctgttgaagcttgatgcaaaataaattatggaactctgttttttgtttatctaataataactagcaaatatgcttccattgcattgaaactaacagccttttgtgtttccaagttttattttgtgacaatgtcatctatttcaattagttgtggaatcggaaacttgcaggactaacttggaaactccaatccctcagcatcctggactttttcctggtgtaatccatgtagatattattttaatcatcattttagttctggaggtttttccatctccggttttgctcccctttcttcaaaaaaaaaaaaaaaatgccgtaggcgccgcaacgcccacctgttgttcaaactcatgggcacgagtggctcgaagattttatacaacaattgctgtagtttcaccgttgctggtgaagaagcatttttttaaaaaaatatagtggtattcattttaattagtttagttgtgcagcgagcaaaatttggacatgctctgctcggaatctgatcgacctagacacagattagcagcagtagctttgtcatctgttccaagagttgcgatctgatagaagaaaaaaaaaccttcccttcaatgtaaaaccgaaactaacaagaaagaagcacagtgccgtttaggcaagtatggagtacgtattaagcatgtagaaggccatgcatgaaccactaacaagaaagaagcgcagtgccattcaggcaagcataagcatgtagattggcatgcatgaacaactaacagtagatcgtctctggtctgattagaagttttttgggaagccaagaaatcatgtacaactggttccatctcaaattccgtggcaaaaagaggcctaagcaacatacctcgagtagatcacattcaagcttggtcacccggtccgtcaatattctgattccgatgacttcgtaggttcctagctcaagccgctcgtgtccaagcgtcacttacgattagctaatgattacggcatctaggaccgactagtggcgcgccgactagctagctaaggtaccgagctcgaattcattccgattaatcgtggcctcttgctcttcaggatgaagagctatgtttaaacgtgcaagcgctactagacaattcagtacattaaaaacgtccgcaatgtgttattaagttgtctaagcgtcaatttgtttacaccacaatatatcctgcca

SEQ ID NO: 273 - DNA, 21374 bp, Artificial Sequence
  PHP100057
gtttacccgccaatatatcctgtcaaacactgcggccgcacttgaccgcggatggagccggagctgtggtgaggccatcgacgggaggtgggggagaacacagtctcagtgttctttgtgagtccgcaaggtttttagcttttctgtattaattaaggttgctgttggctgtagaatacggtcgtggaagagctgtatcggtagctactacgtaagctattatatactggaagtctggagctcgtcgatctccggtcgtcttcctccatttctcctcgtcttgctttgactgctgctaccatttgcttctgttttctgatgaagcatgccatgtcggccaccagtgtttgtgtggtttttgcagggaatggctttcaagtgctgtgattgaatggccctcgtcgtcctcggctgagctcacatggacgcgtcatgtgagtgagatatatgatcatatgatgagtggggttcgggtgagtgcgtacttgaagtaggatcccgctttcactcattcattcattggcctttaaaccgggaaattttcgcgaggagatggagggaagcaagcagggtgacgagtgcagagtgccgcgagcgctttgtcaaaaggcaccgccgtaggcaaaaaaatcaatggccctgactgactcgatggtagtactactgtagagactagagagggttgctccccatatcttcgtgtgacttttactccagcattgcatttccgtcattgagacgttaattaatagcagctttcgggacagatgactgtggccatgtttcgtcacggccgcttcgtgccagctgggggtactatagtactgtgattttgttagtaaaaactttcattaggccaccattgacgaccgggccttcgcttttgctgcgctaattaaccatttcccggcgaccgaagggaacatgaacatgccccgacacatgagggcatgaggactagtgttctccctgtcgttcgttgacttgactagtgatagtttaaacgctcttcaactggaagagcggttactaccggttcactagctagctgctaatcgagctagttaccctatgaggtgacatgaagcgctcacggttactatgacggttagcttcacgactgttggtggcagtagcgtacgacttagctatagttccggacttacccttaagataacttcgtatagcatacattatacgaagttatgggcccacgcgtgaagagcggttaccagagctggtcacctttgtccaccaagatggaactgtcttcggccagaatggccatctggattcagcaggcctagaaggccatttatcgctatcaactttgtatagaaaagttgggccgaattcgagctcggtacggccagaatggcccggaccgaagcttgcggccgcacactgatagtttaaactgaaggcgggaaacgacaatctgatcatgagcggagaattaagggagtcacgttatgacccccgccgatgacgcgggacaagccgttttacgtttggaactgacagaaccgcaacgttgaaggagccactcagccgcgggtttctggagtttaatgagctaagcacatacgtcagaaaccattattgcgcgttcaaaagtcgcctaaggtcactatcagctagcaaatatttcttgtcaaaaatgctccactgacgttccataaattcccctcggtatccaattagagtctcatattcactctcccgggggatctcgactctagaggatcgctcaggaaggccgctgagatagaggcatggcggccaatgcgggcggcggtggagcgggaggaggcagcggcagcggcagcgtggctgcgccggcggtgtgccgccccagcggctcgcggtggacgccgacgccggagcagatcaggatgctgaaggagctctactacggctgcggcatccggtcgcccagctcggagcagatccagcgcatcaccgccatgctgcggcagcacggcaagatcgagggcaagaacgtcttctactggttccagaaccacaaggcccgcgagcgccagaagcgccgcctcaccagcctcgacgtcaacgtgcccgccgccggcgcggccgacgccaccaccagccaactcggcgtcctctcgctgtcgtcgccgccgccttcaggcgcggcgcctccctcgcccaccctcggcttctacgccgccggcaatggcggcggatcggctgtgctgctggacacgagttccgactggggcagcagcggcgctgccatggccaccgagacatgcttcctgcaggactacatgggcgtgacggacacgggcagctcgtcgcagtggccacgcttctcgtcgtcggacacgataatggcggcggccgcggcgcgggcggcgacgacgcgggcgcccgagacgctccctctcttcccgacctgcggcgacgacggcggcagcggtagcagcagctacttgccgttctggggtgccgcgtccacaactgccggcgccacttcttccgttgcgatccagcagcaacaccagctgcaggagcagtacagcttttacagcaacagcaacagcacccagctggccggcaccggcaaccaagacgtatcggcaacagcagcagcagccgccgccctggagctgagcctcagctcatggtgctccccttaccctgctgcagggagtatgtgagagcaacgcgagctgccactgctcttcactgatgtctctggaatggaaggaggaggaagtgagcatagcgttggtgcgttgctgtcaagggcgaattcacatggttaacctagacttgtccatcttctggattggccaacttaattaatgtatgaaataaaaggatgcacacatagtgacatgctaatcactataatgtgggcatcaaagttgtgtgttatgtgtaattactagttatctgaataaaagagaaagagatcatccatatttcttatcctaaatgaatgtcacgtgtctttataattctttgatgaaccagatgcatttcattaaccaaatccatatacatataaatattaatcatatataattaatatcaattgggttagcaaaacaaatctagtctaggtgtgttttgcgaatgcggccgccaccgcggtggagctcgaattccggtccgggcctagaaggccagcttcaagtttgtacaaaaaagcaggctccggccagaatggcccggaccgtcactgactagctaaacagcggccgcatcgagcagctggcttgtggggaccagacaaaaaaggaatggtgcagaattgttaggcgcacctaccaaaagcatctttgcctttattgcaaagataaagcagattcctctagtacaagtggggaacaaaataacgtggaaaagagctgtcctgacagcccactcactaatgcgtatgacgaacgcagtgacgaccacaaaactcgagcaacgagatcatgagccaatcaaagaggagtgatgtagacctaaagcaataatggagccatgacgtaagggcttacgcccatacgaaataattaaaggctgatgtgacctgtcggtctctcagaacctttactttttatgtttggcgtgtatttttaaatttccacggcaatgacgatgtgaccgtcgacccactaaaacattgctttgtcaaaagctaaaaaagatgatgcccgacagccacttgtgtgaagcatgagaagccggtccctccactaagaaaattagtgaagcatcttccagtggtccctccactcacagctcaatcagtgagcaacaggacgaaggaaatgacgtaagccatgacgtctaatcccagggcccggtgaccaatcgaattagcttggcgcgtggaccgaagcttgcatgcctgcaggtaccattattttccccccattttctcattttagaagcaacaatttactattacaatttctgttatcattttctatttttcatttacaaactgaggtcaaattcaggttttcaataaatgcatgataaccacatcatcaacaagagatgtgccattctttatttgtttattagttacttaactaatttaatactctttgttggttataaataggaagggtcctaatgaagtttcaaaggtttcaacaattctcctaacttcattataaatatatttatttatttatttatttattttatatatttttgtcacttctaccaattttgacctttagagtttataatacaaaacagtgttttgtaagtaaatacacgtttttgttgaacctaatagggtttttaccatcgagtatcagactatccacactcatataactctaaatttctaccatatgagaatatattgtacttgtcagcaaaaaactttacttataccacaattttccgtagtcatatctgctatatatctcaactctataccaaccgcaacatattatatcatttttgtctctttcctctcacctactcgcccaactcctcctggcttggtgacttctgtgcctgcacgtccaatgccatatggagaacatagaagagatggagtaagcctctccctaccacccataccttttagggtagatcgctacaacgtttcagttgctgcaaagaagacccaatatcatcaggtcgctcaatgcggatagcctcaatctatccacattcatcctactctaaaaagaatactccatcttagtcattaatattttaaaatacaatagagtcctacatctacaactattctatatctcaactcgatataactactacattttgatgaatatatatcgaacacatccggttaattgtgggcttgtggcgttgtgttcatgtcgccgccccacaaccacaagctcggcgggtcggcctcattgctgcatagcgttcgaacttcgaaccgtacaaacagtatctgaccgtttcctgtcggttgctgtaaagtagcgtcacgtatagagtagctgcagcacatttcgtacatacctcgagtagcgtagcgcaccctagtgtgtcactgtggacagcctcagggtctgtttggttgggctgtggctgtgaaaaaagttgctgtgggctgtgagctgtggaaaaagctgctgtaggctgtaagctgttaaaaagctaaaaaccgtttggtagaaaccactaaaagtcgttaaaaatccttcgatatatgttttcatagttccatccgaaaagccactaaaagcaggtccagaggtgctttcagatttgcactacaagaaaatcggtttttagaaaaagctgcttcctggatccagccctttggttggcttttggcttttaggggggcaaaagccaaagtcaaaagttaaaccaaacacaccctcagtcacccattcacatctctaccctagtgcgcttcccttataaaacctagctcctcaagctccagacgcagtcgaccgccgcagaccgggagtagtcgacgcgccgtcactgaatcctcagatcacggctagccgtaatcacgccactctgctgactcccggcgaggtactctgacgcatgcgcgagcgcttctcttcttctcttttcgctgtgcttttagtctgttcgtttgatgcccagatctactaggtttgtgtgatgagccgagccgatttatgcactggatttttagtcaagtgttgtttccgcctccgctatctttagtgtctatgtctgaatttgggttcagtgattatcgagctataaattatagttgttgcgctgttctatactagatccagttaccgatctatgatattacggggttgagcgattcatgtgctggagtactagtccaagatttgcttccgtctcctcatctacctttagtatgtactctgtatataaacttaattgcagtttgcaactgattctcggccatatattacttccgttgcgttgttcattagatccatttccgatccctgatattacgtgggtggggggtacttcgactttgttttttccggattgtttgattactggtctattcccatacatatttgtttctcattgattttatataattttgatgtaagcagcagtgtaacattttccttcagccccatggccactgtgaacaactggctcgctttctccctctccccgcaggagctgccgccctcccagacgacggactccacactcatctcggccgccaccgccgaccatgtctccggcgatgtctgcttcaacatcccccaagattggagcatgaggggatcagagctttcggcgctcgtcgcggagccgaagctggaggacttcctcggcggcatctccttctccgagcagcatcacaaggccaactgcaacatgatacccagcactagcagcacagtttgctacgcgagctcaggtgctagcaccggctaccatcaccagctgtaccaccagcccaccagctcagcgctccacttcgcggactccgtaatggtggcttcctcggccggtgtccacgacggcggtgccatgctcagcgcggccgccgctaacggtgtcgctggcgctgccagtgccaacggcggcggcatcgggctgtccatgattaagaactggctgcggagccaaccggcgcccatgcagccgagggtggcggcggctgagggcgcgcaggggctctctttgtccatgaacatggcggggacgacccaaggcgctgctggcatgccacttctcgctggagagcgcgcacgggcgcccgagagtgtatcgacgtcagcacagggtggagccgtcgtcgtcacggcgccgaaggaggatagcggtggcagcggtgttgccggcgctctagtagccgtgagcacggacacgggtggcagcggcggcgcgtcggctgacaacacggcaaggaagacggtggacacgttcgggcagcgcacgtcgatttaccgtggcgtgacaaggcatagatggactgggagatatgaggcacatctttgggataacagttgcagaagggaagggcaaactcgtaagggtcgtcaagtctatttaggtggctatgataaagaggagaaagctgctagggcttatgatcttgctgctctgaagtactggggtgccacaacaacaacaaattttccagtgagtaactacgaaaaggagctcgaggacatgaagcacatgacaaggcaggagtttgtagcgtctctgagaaggaagagcagtggtttctccagaggtgcatccatttacaggggagtgactaggcatcaccaacatggaagatggcaagcacggattggacgagttgcagggaacaaggatctttacttgggcaccttcagcacccaggaggaggcagcggaggcgtacgacatcgcggcgatcaagttccgcggcctcaacgccgtcaccaacttcgacatgagccgctacgacgtgaagagcatcctggacagcagcgccctccccatcggcagcgccgccaagcgcctcaaggaggccgaggccgcagcgtccgcgcagcaccaccacgccggcgtggtgagctacgacgtcggccgcatcgcctcgcagctcggcgacggcggagccctggcggcggcgtacggcgcgcactaccacggcgccgcctggccgaccatcgcgttccagccgggcgccgccagcacaggcctgtaccacccgtacgcgcagcagccaatgcgcggcggcgggtggtgcaagcaggagcaggaccacgcggtgatcgcggccgcgcacagcctgcaggacctccaccacctgaacctgggcgcggccggcgcgcacgactttttctcggcagggcagcaggccgccgccgctgcgatgcacggcctgggtagcatcgacagtgcgtcgctcgagcacagcaccggctccaactccgtcgtctacaacggcggggtcggcgacagcaacggcgccagcgccgtcggcggcagtggcggtggctacatgatgccgatgagcgctgccggagcaaccactacatcggcaatggtgagccacgagcaggtgcatgcacgggcctacgacgaagccaagcaggctgctcagatggggtacgagagctacctggtgaacgcggagaacaatggtggcggaaggatgtctgcatgggggactgtcgtgtctgcagccgcggcggcagcagcaagcagcaacgacaacatggccgccgacgtcgggcatggcggcgcgcagctcttcagtgtctggaacgacacttaagcgtacgtgccggcctggctctccgaaagggcgtattccagcacactggcggccgttactagacccaacctagacttgtccatcttctggattggccaacttaattaatgtatgaaataaaaggatgcacacatagtgacatgctaatcactataatgtgggcatcaaagttgtgtgttatgtgtaattactagttatctgaataaaagagaaagagatcatccatatttcttatcctaaatgaatgtcacgtgtctttataattctttgatgaaccagatgcatttcattaaccaaatccatatacatataaatattaatcatatataattaatatcaattgggttagcaaaacaaatctagtctaggtgtgttttgcgaatgcggcctccgggcacccagctttcttgtacaaagtggccgttaacggatcggccagaatggcccggaccgggttaccccgcggttcaaagccaatgactgttgttaggtccagtttctaaggacgaatcatccaatcactggttctttctgaacaaaacaaagagctatagagttacgttactgtagccgagacagagcctgcaatctggttatgccacatactaggttctttcttaaagttgactcactctatcctaagttctacttacaaggagctacaacaaattggtcataaccggagagcgttcaaggaggtaatatcccatcttactctgtagcaaggctacaaaaggagagctaaagaactaggctacaaaaagagagctaaagaactaactatctagcaagactacagagctatagtgtagagatttcataaccggtgagcgttcaaggatactttgaagagaagaggtaatatctcaactagcaagactacaaaaaaatggagatataaaactaactgtctaacaagactacagagctatagtagagatagatacgttcgacacttaagcatgagaattcgagctcggtaccctggttcacaaactcaatacaacacacagtggagtagggtattacgctccggcggcccgaaccactctaaatccttgtgtcctcgtgtgctcttccaccattaatgactgtaattgcagggacacgaagagttgtagcgcttttgccaacaagatccgctatatgctagtagagtggaacctgcacagcaacaagcatccaataatctgagaataagaattatgtgtggtgatggttctcatctctgcaactcgccattttcgcgagagaaccaaatccaagttggtgaagatcatgatttgggctcatgggctggcatagtagctattacctttgcaattgtggttcgaatctatccgatattctccttttcagggagagctaatgcttatgcttattgggtattttggtttgacactgcttcacgcccaaaaaaaggcaactatgtctgagttggatatggcccaaaaaaaggcagctatgtctgagttggatatggaagtcttctttcgtttagggtgaagtaagaccaagctcatgagcttattatcttaggtcggaacaaattagttgataggcatggcacatttatcaaattataatgattttaacagaaaagcaacacctctttttcagcagcaccagctttgcaagctgcaattgacactccaagcatagtatttgctccaaactcagcctgcatttcgcacaatatcatatctatttccatttggataaaatatattttccagaaatatgggaacagaatcaagatacagaaaaaagttgtggtagtagtggtaagtggaaacacaagtacagtgaaaagatagcattatttctgaacagtcaaattaaccgaaataagtagtatcacatactgcccctaaattgactacacccaatgtaaagaattgcttgagcatattgagccatcagttgtttgtttgtgtaacggatttgacaatgcagagttcaggagcaaaaaaccgcaaaggagagaaagagggaaaggatctcctagtatcccaccttgtggcgcgccctgtcaagtgcatgatggcctggtcgatctgcgtctgctgctgcggttccatcccaacgagtgcctccgacaccttgtcgttgatcacccgcaccgcgtaggcgacccccctggcgaggaacttccgcctctcggaggccccggccgcgtcggcggcggcgccctcgagcgcgcccacgctagccgtagatgctcggtgcacggccttgttggtgtgcaactcgacctcaacggccggtgcgctacgcccgtcaaggatctggcgcgcccgcaccctcgtgatcacggtgggcgcctcccgcctcatgtggccgacgatgaaaagcgccgggttaggggccttggcgcgcaccgccgtattcagggcctcctcgctcttgcgcgagagcaggtgcttccccaggtactcctgcactgacaaggctgccacagcggtggaatttgtcctcacgacttcgccacgtcgtcctcacctccctggcttcccacgactccgccgtatcgaggtgctcggtgggtcgtcttaatccgaagtccgaactaggaagacgagacagagaggtctgaggaatgggcctcgtttgatgttgagctgaattatttttccagcataagcccaggtcttggtccatgaacaaaattactagaaacccagcccagtactacgatctaaaagagggactgccactggatagctctctctagcattctccacgctccaatacagcggcgtcgtgtctatccgggtctatccgcgaacacgtgagaactctccagaaactgctttctcctccacttcatctctctcgctttccctctataaaaagaccccttctaggaattgagggagacagcaagcaccaagcagcgatccgaagctcaatcaattcactcaaacctcttccccaaatcttcgattagatcttcgttgacaagaagactagaaccgaacctgacatgtccaacctgctcacggttcaccagaaccttccggctcttccagtggacgcgacgtccgatgaagtcaggaagaacctcatggacatgttccgcgacaggcaagcgttcagcgagcacacctggaagatgctgctctccgtctgccgctcctgggctgcatggtgcaagctgaacaacaggaagtggttccccgctgagcccgaggacgtgagggattaccttctgtacctgcaagcgcgaggtttgtttctgcttctacctttgatatatatataataattatcattaattagtagtaatataatatttcaaatatttttttcaaaataaaagaatgtagtatatagcaattgcttttctgtagtttataagtgtgtatattttaatttataacttttctaatatatgaccaaaacatggtgatgcctaggtctggcagtgaagaccatccagcaacaccttggacaactgaacatgcttcacaggcgctccggcctcccgcgccccagcgactcgaacgccgtgagcctcgtcatgcgccgcatcaggaaggaaaacgtcgatgccggcgaaagggcaaagcaggccctcgcgttcgagaggaccgatttcgaccaggtccgcagcctgatggagaacagcgacaggtgccaggacattaggaacctggcgttcctcggaattgcatacaacacgctcctcaggatcgcggaaattgcccgcattcgcgtgaaggacattagccgcaccgacggcggcaggatgcttatccacattggcaggaccaagacgctcgtttccaccgcaggcgtcgaaaaggccctcagcctcggagtgaccaagctcgtcgaacgctggatctccgtgtccggcgtcgcggacgacccaaacaactacctcttctgccgcgtccgcaagaacggggtggctgcccctagcgccaccagccaactcagcacgagggccttggaaggtattttcgaggccacccaccgcctgatctacggcgcgaaggatgacagcggtcaacgctacctcgcatggtccgggcactccgcccgcgttggagctgctagggacatggcccgcgccggtgtttccatccccgaaatcatgcaggcgggtggatggacgaacgtgaacattgtcatgaactacattcgcaaccttgacagcgagacgggcgcaatggttcgcctcctggaagatggtgactgaggtacccaacctagacttgtccatcttctggattggccaacttaattaatgtatgaaataaaaggatgcacacatagtgacatgctaatcactataatgtgggcatcaaagttgtgtgttatgtgtaattactagttatctgaataaaagagaaagagatcatccatatttcttatcctaaatgaatgtcacgtgtctttataattctttgatgaaccagatgcatttcattaaccaaatccatatacatataaatattaatcatatataattaatatcaattgggttagcaaaacaaatctagtctaggtgtgttttgcgatccgatatcgaattggccacggtaccagctgctgctgttctagggttcacaagtctgcctatttgtcttccccaatggagctatggttgtctggtctggtccttggtcgtgtcccgtttcattgtgtactatttacctgtaatgtgtatccttaagtctggtttgatggtgtctgaaacgttttgctgtggtagagcagcatggaagaactataatgaataagtgatccctaatcattgtgtccaaattttgcttctgctatacccttttgtgctgtttcttatgttttgcttaaaaatttgatctgacaaacaaatttgtctaaattatgctcttgttctgactgtgtactgtacacatttgtattgctaccggtttggcacatagttttctctttgattgcagatcaaacccttctgattgcagattgcttggctatggctgatgtgctcactgttcttctttagcttgtatattgctgatggtggcttggctacggctgaaaaagttgctgctgcgccgacttggcaactgttgctccagtaatgctttgtcctctcttcctagccgccgacttggcacttggcagctgttgctcctgtaatgcgttgttatctcttatctcttgagatgtactatgattttgaggctgtttgacttgtgccagattgccagtgctgatgctatattatctcaggtttttatgctagtatatgttttactgtgtgctgcctgtgtcgagttacgtaatctattgaaccgctatgcgtgttgatgccctgttgttgcttgccagattgatgcccctgttgcttgcagcttgcaagctgtagtgaaatcctaaaattccaaaccaaatctattctgaacttttgaagatctgtgatgtccggaagaaaagattcaaacagataaacgggactctccagaatctataaaataaatgatcgacaaacgctttgctttggtaggcttcaagcttggtcacccggtccgggcctagaaggccagcttcggccgccccgggcaactttattatacaaagttgatagataaatcagatatctggttcctaaggacccggcggaccgattaaactgattcggtccgacgcgttacctaataacttcgtatagcatacattatacgaagttattagctaactaactagtaagcttaagccatgggtcgacggatccgttaactagcgtggcatttggcaccgccgcacactatgcgagctaggagtgctagtttacagatgaaactatgaaaccaagaaaacacaattgtccgtagctagcgcgtggcgtcgtgtcaagcttcacacagtatcttcgttcttcactataaatcgcgcctgttgttcgtgagacccaccaccgtggataacagtcccctaataataagcgatcaacagcactgctgatggctgaacaccgaggcgccgccgcgcgtaaccatccgccggagcagcccgtcgtgccggcgaacgacgccttccccgaccgcgcccagcagctctgcctcgacgccgggcgcgcgctcgcgatgtgcggcgtgctcgtcgccgtccctcccgcattttacgcgtcgacgtcgcggacgacaccgcacttgccttcgtcggcttcgtcctctggatcatcggtgcgtggctgtgcctcctggcgctcacgcccttggctccacgggcggtgagggcgggcggggccgccgccagcaccttgctgatcaggtgcctgtccctttcatgaactactagcgcccgcgcccgcggccgccgggcacaagagaacacatcgatgttcgctgcgtacgtcagcaataaggcactctttgtcagtagtcgagtgcatatgttgggtgtttgccctgggagatttcaagtgttgtggccattatcccgcaggataaaaaatcggcggcttttggattgatacggaaaataacgatgtttcatgctcgtgttgtgtgtgtgacatcttgtcagccaagtttttaaccgttgctactccccctctgtgggctcagtgtgtggaccggaatacgtcgtacataggccgtagcctaagcccaatatgccgtttttcaggttggcctgtgtgacgacaagcgggtctcaaaagcccatcacgcaactggcctgcaattattggaggagagcgcgtcgagttggttccagaggctgcgtggtggggccggactctgcgacgacctctcgttcgcgtccgatttggttgccgtgagccgtgacgtaacgcctccttccgttcctccctatataagttccacccccgggtccggtttccccaagccccagtgacccccgatcccgatcgcgaaatctccgcacccgccggcaagggaccgaagcaagcctctctcccgaccgtcgcatcaaggtacgcgtccgctcgatctgtcctcttccttctcgatttgacttgctgtggtgcccgatcacgggatcagaatcgcaccagtgtagatttcgcatgttctaagatgtgttagtttccaggctaatccagttctcttgacgcccgatccgatcgagctccgtgtttatttcagcctaatcgtagtattcccctaaaatttcctcattagggggttcgcaagattgttggtcgacaggttcacttatgctcgatcgcttacttttagtcgattcatgctgcgtactattgttgccccccgtggttttatcttttctcgtgtgaaatccagtagatatagtagatatcgtagcattaggttttaattcaatcgattgattattgtatcatcaaaattgagaagttcgaatcatgcctatcatgctgcctcaaccgaaatcctgtatattgaagtttcaattcaattgattgatcattcattagattcaaccaaaatctagaaggttagatgacgcatgtcatgctgcctgcgtagtttacctttgatctgtttatgattaccttatcagtaggatatttgtgattttgggaagtagcactaactgattcatgctgacatgatgttccctttcagattatactgttgagtcctatctaattgatgctttgtatgctatatgaatacgtcatggtaaattagcagttaattagcatattagcaattgggcgtacctcatcaggattgctcttgtagatgtgtgtggtgatgtttcttgttcaattcatgttctgctttaaaagtatgtgttctctgtttgttaattaagattcatggttataatgatttggacctaattaatcagggttgcccttttagatgcgtggttacttgttgagttcatttttttcctgctatagttgtatgcgtttgttcattcatggttagatttgatttgtttcttctctattccatgccttccatatacttcaattgtagcttaacatgagatttctgtatatgcaggtcgaccgccggggatccacacgacaccatggcccagtccaagcacggcctgaccaaggagatgaccatgaagtaccgcatggagggctgcgtggacggccacaagttcgtgatcaccggcgagggcatcggctaccccttcaagggcaagcaggccatcaacctgtgcgtggtggagggcggccccttgcccttcgccgaggacatcttgtccgccgccttcatgtacggcaaccgcgtgttcaccgagtacccccaggacatcgtcgactacttcaagaactcctgccccgccggctacacctgggaccgctccttcctgttcgaggacggcgccgtgtgcatctgcaacgccgacatcaccgtgagcgtggaggagaactgcatgtaccacgagtccaagttctacggcgtgaacttccccgccgacggccccgtgatgaagaagatgaccgacaactgggagccctcctgcgagaagatcatccccgtgcccaagcagggcatcttgaagggcgacgtgagcatgtacctgctgctgaaggacggtggccgcttgcgctgccagttcgacaccgtgtacaaggccaagtccgtgccccgcaagatgcccgactggcacttcatccagcacaagctgacccgcgaggaccgcagcgacgccaagaaccagaagtggcacctgaccgagcacgccatcgcctccggctccgccttgccctccggactcagatctcgatagagtcaacctagacttgtccatcttctggattggccaacttaattaatgtatgaaataaaaggatgcacacatagtgacatgctaatcactataatgtgggcatcaaagttgtgtgttatgtgtaattactagttatctgaataaaagagaaagagatcatccatatttcttatcctaaatgaatgtcacgtgtctttataattctttgatgaaccagatgcatttcattaaccaaatccatatacatataaatattaatcatatataattaatatcaattgggttagcaaaacaaatctagtctaggtgtgttttgcgaattgcggcgcccttactttaacgcctctaaccaacacccctttatctttataaggaacaataaacagaatttgccccactgttctaaatcacctaataatatccccagctaaaaacaataaaggtttcctagaattaagacaagcatgactgttcctccaggagggtttggaacattgttgcagtcttgcagatacgggcgaagggtgagaaacagagcggagggctggaggtgacctcggtagtcgacgccggagttgagcttgacaacgacggggcggcccctgatggacttgaggaagtccgatggcgtcttcaccgtcccgccggcgcccgaggcgggcctgtcgctgccgccgccgccgctgctcatcttgcgcgctgtgcccccggcggtgtccctgtgttgcggatcgcgggtgggccaggtggatgcgagggcgacccgtttggactccggccggagccgccggatccctggtcggtgtcagtgccgtttactctgggccccacgtgtcagtaccgtctgtagatgacaacaacccgtcgtccacagtcatgtccaaaatatcctttcttcttttttttcgattcggatatctatcttccttttttttttccaaaaatcttcttgacgcaccagcgcgcacgtttgtggtaaacgccgacacgtcggtcccacgtcgatagaccccacccaccagtgagtagcgtgtacgtattcgggggtgacggacgtgtcgccgtcgtcttgctagtcccattcccatctgagccacacatctctgaacaaaaaaaaggagggaggcctccacgcacatccccctccgtgccacccgccccaaaccctcgcgccgcctccgagacagccgccgcaaccatggccaccgccgccgccgcgtctaccgcgctcactggcgccactaccgctgcgcccaaggcgaggcgccgggcgcacctcctggccacccgccgcgccctcgccgcgcccatcaggtgctcagcggcgtcacccgccatgccgatggctcccccggccaccccgctccggccgtggggccccaccgagccccgcaagggtgctgacatcctcgtcgagtccctcgagcgctgcggcgtccgcgacgtcttcgcctaccccggcggcgcgtccatggagatccaccaggcactcacccgctcccccgtcatcgccaaccacctcttccgccacgagcaaggggaggcctttgccgcctccggctacgcgcgctcctcgggccgcgtcggcgtctgcatcgccacctccggccccggcgccaccaacctagtctccgcgctcgccgacgcgctgctcgattccgtccccatggtcgccatcacgggacaggtggcgcgacgcatgattggcaccgacgccttccaggagacgcccatcgtcgaggtcacccgctccatcaccaagcacaactacctggtcctcgacgtcgacgacatcccccgcgtcgtgcaggaggctttcttcctcgcctcctctggtcgaccagggccggtgcttgtcgacatccccaaggacatccagcagcagatggcggtgcctgtctgggacaagcccatgagtctgcctgggtacattgcgcgccttcccaagccccctgcgactgagttgcttgagcaggtgctgcgtcttgttggtgaatcgcggcgccctgttctttatgtgggcggtggctgcgcagcatctggtgaggagttgcgacgctttgtggagctgactggaatcccggtcacaactactcttatgggcctcggcaacttccccagcgacgacccactgtctctgcgcatgctaggtatgcatgggacggtgtatgcaaattatgcagtggataaggccgatctgttgcttgcacttggtgtgcggtttgatgatcgcgtgacagggaagattgaggcttttgcaagcagggctaagattgtgcacgttgatattgatccggctgagattggcaagaacaagcagccacatgtgtccatctgtgcagatgttaagcttgctttgcagggcatgaatgctcttcttgaaggaagcacatcaaagaagagctttgactttggctcatggaacgatgagttggatcagcagaagagggaattcccccttgggtataaaacatctaatgaggagatccagccacaatatgctattcaggttcttgatgagctgacgaaaggcgaggccatcatcggcacaggtgttgggcagcaccagatgtgggcggcacagtactacacttacaagcggccaaggcagtggttgtcttcagctggtcttggggctatgggatttggtttgccggctgctgctggtgcttctgtggcaaacccaggtgtcactgttgttgacatcgatggagatggtagctttctcatgaacgttcaggagctagctatgatccgaattgagaacctcccagtgaaggtctttgtgctaaacaaccagcacctggggatggtggtgcagttggaggacaggttctataaggccaacagagcgcacacatacttgggaaacccagagaatgaaagtgagatatatccagatttcgtgacgatcgccaaagggttcaacattccagcggtccgtgtgacaaagaagaacgaagtccgcgcagcgataaagaagatgctcgagactccagggccgtacctcttggatataatcgtcccacaccaggagcatgtgttgcctatgatccctagtggtggggctttcaaggatatgatcctggatggtgatggcaggactgtgtactgactagctagtcagttaacagatctgccagatcctcggtgtacaaataacccgtcttatcctatgagacgggccggcgtcagtgtgttctggaggaatttttatgtcagagcctttttctttgtgtgcttgatgtagatgccaagggaagcttattggctgttgaagcttgatgcaaaataaattatggaactctgttttttgtttatctaataataactagcaaatatgcttccattgcattgaaactaacagccttttgtgtttccaagttttattttgtgacaatgtcatctatttcaattagttgtggaatcggaaacttgcaggactaacttggaaactccaatccctcagcatcctggactttttcctggtgtaatccatgtagatattattttaatcatcattttagttctggaggtttttccatctccggttttgctcccctttcttcaaaaaaaaaaaaaaaatgccgtaggcgccgcaacgcccacctgttgttcaaactcatgggcacgagtggctcgaagattttatacaacaattgctgtagtttcaccgttgctggtgaagaagcatttttttaaaaaaatatagtggtattcattttaattagtttagttgtgcagcgagcaaaatttggacatgctctgctcggaatctgatcgacctagacacagattagcagcagtagctttgtcatctgttccaagagttgcgatctgatagaagaaaaaaaaaccttcccttcaatgtaaaaccgaaactaacaagaaagaagcacagtgccgtttaggcaagtatggagtacgtattaagcatgtagaaggccatgcatgaaccactaacaagaaagaagcgcagtgccattcaggcaagcataagcatgtagattggcatgcatgaacaactaacagtagatcgtctctggtctgattagaagttttttgggaagccaagaaatcatgtacaactggttccatctcaaattccgtggcaaaaagaggcctaagcaacatacctcgagtagatcacattcaagcttggtcacccggtccgtcaatattctgattccgatgacttcgtaggttcctagctcaagccgctcgtgtccaagcgtcacttacgattagctaatgattacggcatctaggaccgactagtggcgcgccgactagctagctaaggtaccgagctcgaattcattccgattaatcgtggcctcttgctcttcaggatgaagagctatgtttaaacgtgcaagcgctactagacaattcagtacattaaaaacgtccgcaatgtgttattaagttgtctaagcgtcaatttgtttacaccacaatatatcctgcca

SEQ ID NO: 274 - DNA, 21308 bp, Artificial Sequence
  PHP100058
gtttacccgccaatatatcctgtcaaacactgcggccgcacttgaccgcggatggagccggagctgtggtgaggccatcgacgggaggtgggggagaacacagtctcagtgttctttgtgagtccgcaaggtttttagcttttctgtattaattaaggttgctgttggctgtagaatacggtcgtggaagagctgtatcggtagctactacgtaagctattatatactggaagtctggagctcgtcgatctccggtcgtcttcctccatttctcctcgtcttgctttgactgctgctaccatttgcttctgttttctgatgaagcatgccatgtcggccaccagtgtttgtgtggtttttgcagggaatggctttcaagtgctgtgattgaatggccctcgtcgtcctcggctgagctcacatggacgcgtcatgtgagtgagatatatgatcatatgatgagtggggttcgggtgagtgcgtacttgaagtaggatcccgctttcactcattcattcattggcctttaaaccgggaaattttcgcgaggagatggagggaagcaagcagggtgacgagtgcagagtgccgcgagcgctttgtcaaaaggcaccgccgtaggcaaaaaaatcaatggccctgactgactcgatggtagtactactgtagagactagagagggttgctccccatatcttcgtgtgacttttactccagcattgcatttccgtcattgagacgttaattaatagcagctttcgggacagatgactgtggccatgtttcgtcacggccgcttcgtgccagctgggggtactatagtactgtgattttgttagtaaaaactttcattaggccaccattgacgaccgggccttcgcttttgctgcgctaattaaccatttcccggcgaccgaagggaacatgaacatgccccgacacatgagggcatgaggactagtgttctccctgtcgttcgttgacttgactagtgatagtttaaacgctcttcaactggaagagcggttactaccggttcactagctagctgctaatcgagctagttaccctatgaggtgacatgaagcgctcacggttactatgacggttagcttcacgactgttggtggcagtagcgtacgacttagctatagttccggacttacccttaagataacttcgtatagcatacattatacgaagttatgggcccacgcgtgaagagcggttaccagagctggtcacctttgtccaccaagatggaactgtcttcggccagaatggccatctggattcagcaggcctagaaggccatttatcgctatcaactttgtatagaaaagttgggccgaattcgagctcggtacggccagaatggcccggaccgaagcttgcggccgcacactgatagtttaaactgaaggcgggaaacgacaatctgatcatgagcggagaattaagggagtcacgttatgacccccgccgatgacgcgggacaagccgttttacgtttggaactgacagaaccgcaacgttgaaggagccactcagccgcgggtttctggagtttaatgagctaagcacatacgtcagaaaccattattgcgcgttcaaaagtcgcctaaggtcactatcagctagcaaatatttcttgtcaaaaatgctccactgacgttccataaattcccctcggtatccaattagagtctcatattcactctcccgggggatctcgactctagaggatcgctcaggaaggccgctgagatagaggcatggcggccaatgcgggcggcggtggagcgggaggaggcagcggcagcggcagcgtggctgcgccggcggtgtgccgccccagcggctcgcggtggacgccgacgccggagcagatcaggatgctgaaggagctctactacggctgcggcatccggtcgcccagctcggagcagatccagcgcatcaccgccatgctgcggcagcacggcaagatcgagggcaagaacgtcttctactggttccagaaccacaaggcccgcgagcgccagaagcgccgcctcaccagcctcgacgtcaacgtgcccgccgccggcgcggccgacgccaccaccagccaactcggcgtcctctcgctgtcgtcgccgccgccttcaggcgcggcgcctccctcgcccaccctcggcttctacgccgccggcaatggcggcggatcggctgtgctgctggacacgagttccgactggggcagcagcggcgctgccatggccaccgagacatgcttcctgcaggactacatgggcgtgacggacacgggcagctcgtcgcagtggccacgcttctcgtcgtcggacacgataatggcggcggccgcggcgcgggcggcgacgacgcgggcgcccgagacgctccctctcttcccgacctgcggcgacgacggcggcagcggtagcagcagctacttgccgttctggggtgccgcgtccacaactgccggcgccacttcttccgttgcgatccagcagcaacaccagctgcaggagcagtacagcttttacagcaacagcaacagcacccagctggccggcaccggcaaccaagacgtatcggcaacagcagcagcagccgccgccctggagctgagcctcagctcatggtgctccccttaccctgctgcagggagtatgtgagagcaacgcgagctgccactgctcttcactgatgtctctggaatggaaggaggaggaagtgagcatagcgttggtgcgttgctgtcaagggcgaattcacatggttaacctagacttgtccatcttctggattggccaacttaattaatgtatgaaataaaaggatgcacacatagtgacatgctaatcactataatgtgggcatcaaagttgtgtgttatgtgtaattactagttatctgaataaaagagaaagagatcatccatatttcttatcctaaatgaatgtcacgtgtctttataattctttgatgaaccagatgcatttcattaaccaaatccatatacatataaatattaatcatatataattaatatcaattgggttagcaaaacaaatctagtctaggtgtgttttgcgaatgcggccgccaccgcggtggagctcgaattccggtccgggcctagaaggccagcttcaagtttgtacaaaaaagcaggctccggccagaatggcccggaccgtcactgactagctaaacagcggccgcatcgagcagctggcttgtggggaccagacaaaaaaggaatggtgcagaattgttaggcgcacctaccaaaagcatctttgcctttattgcaaagataaagcagattcctctagtacaagtggggaacaaaataacgtggaaaagagctgtcctgacagcccactcactaatgcgtatgacgaacgcagtgacgaccacaaaactcgagcaacgagatcatgagccaatcaaagaggagtgatgtagacctaaagcaataatggagccatgacgtaagggcttacgcccatacgaaataattaaaggctgatgtgacctgtcggtctctcagaacctttactttttatgtttggcgtgtatttttaaatttccacggcaatgacgatgtgaccgtcgacccactaaaacattgctttgtcaaaagctaaaaaagatgatgcccgacagccacttgtgtgaagcatgagaagccggtccctccactaagaaaattagtgaagcatcttccagtggtccctccactcacagctcaatcagtgagcaacaggacgaaggaaatgacgtaagccatgacgtctaatcccagggcccggtgaccaatcgaattagcttggcgcgtggaccgaagcttgcatgcctgcaggtacccgcacgcgggggtgttccatcgtgtctgccaaaaaccttttgctactgtatgtacggtccaaacgtggtttggtgatgttgcgtcttttcacgaccgtcgtgggccgacagcgtcgtcctaggttcctttcttgccgatccgttcggcaaggacttggtcattcgtcctgtctcgtagacttgctcggcagggacttggtcggtcaccccgtctcgcagacttgctcgtccgggacttggtcgttcgcccctcctcgcatacttgctcgacggggacttggttgctggtcccgtctcgcaaacttgctcgatgaggacttggacatttgctccgccgagtagacttgctcggcggggacttggtcgttcgccccgcatcatagacttgctcgacacagactcagttggtaaatgggccagagaggggtttgtgggggtatcccgttcttgggtacttgacacaattatttgtagtttttacctgttaaaacttcaaatatgatgttcatattcatatctttattggtatcactcttcgtgtatacatttatttatcctatgtacatgcaatgtaaatgatacatagtgcatattgaccttatttttaacatgtacttctttcaaagcaaaccacccgcgaagtgtcacaatgcatacatccttcggtgtcgagggacctcatcatgaggcccctgcccccctaagtctagcttccaatgtcatttaaggaagaagatgagtttcgaggcctttagggcctctgaggttctaccgaacaatctaggttatctttgtctcttagatcccctgcatcagacccctcttggacctcgaccttggagcccttcaaggttctgaagccctcttgagatctatggctcttaatgtgggaacccaagcttctctcttgactaagtacaagaatgctccacattgaggcatacaactagttgtaacccccgggcaagaagtaccatgggagtatggtcccatagccacaactgtctctacttaagacgaccatgtgatactaatgttccgaataaagcttttgcacatcacattaatgtgatggatgatattgtggtcaagcaggcatatggtagccaccacaaaggatatgaagcatacccaaatccactatgaggagtgtgtcgcgtacctatgccacacctaaatgtgctaatttacctgtaagcattataaaatataagcaattacaccgtatctgatggcatggactcgagtacataactatgatatgatatatttctcactgccgcaagatatgcatattacaatgacatgttcaagcgccattgtggtccgcgtagagtcctcgtctctaacaagatgaagtaatcgagcatgttcactacgaaccaacatgtgatcctcctcttcttcgagctataaaatattcatccagcttaaatttcaaaatatgtgtgtcagagttaaaaaaatattcgattcaaatctaaatatcagttctgtattcatatcctagaatattcgaatctatatttgaattcagattacaaggtagtgaattgtgacatgtattcgttcctatccgatccgtcgtttttgagcactaggtgcggtcactgtgacgcgtggacttggcttcgcccactgccatcgtggacccacgtcatcagcaagtgtccatatccaccacccgacccgacgaccgcttgccgtccgatccgtgtgctcccgagggcaaggatggcatttcgccacgcgagatatttttcggtggcctgcacaggccggcagtgcagcggccaaaacgaggtcaggtcagtcacgctgggccccgcctcacgctcccgtcctgctccgggtcccaacaaagccgtccccgggaggtgctcgtgtgctcgtagcgcggtggcgaccccgatgccccgcatattccactgggcgtccgcgccgtcggatgggatcaggacggccgcggcggccccgcgctcggctataaagacgctgcgggggacgcattccctctccgtgctttcttagaggtgggttggcttctcctccccctccggttcgggttcgggttcgtgaggttctccggggttcgggttcgtgggtgagcggatcgagggatccatggccactgtgaacaactggctcgctttctccctctccccgcaggagctgccgccctcccagacgacggactccacactcatctcggccgccaccgccgaccatgtctccggcgatgtctgcttcaacatcccccaagattggagcatgaggggatcagagctttcggcgctcgtcgcggagccgaagctggaggacttcctcggcggcatctccttctccgagcagcatcacaaggccaactgcaacatgatacccagcactagcagcacagtttgctacgcgagctcaggtgctagcaccggctaccatcaccagctgtaccaccagcccaccagctcagcgctccacttcgcggactccgtaatggtggcttcctcggccggtgtccacgacggcggtgccatgctcagcgcggccgccgctaacggtgtcgctggcgctgccagtgccaacggcggcggcatcgggctgtccatgattaagaactggctgcggagccaaccggcgcccatgcagccgagggtggcggcggctgagggcgcgcaggggctctctttgtccatgaacatggcggggacgacccaaggcgctgctggcatgccacttctcgctggagagcgcgcacgggcgcccgagagtgtatcgacgtcagcacagggtggagccgtcgtcgtcacggcgccgaaggaggatagcggtggcagcggtgttgccggcgctctagtagccgtgagcacggacacgggtggcagcggcggcgcgtcggctgacaacacggcaaggaagacggtggacacgttcgggcagcgcacgtcgatttaccgtggcgtgacaaggcatagatggactgggagatatgaggcacatctttgggataacagttgcagaagggaagggcaaactcgtaagggtcgtcaagtctatttaggtggctatgataaagaggagaaagctgctagggcttatgatcttgctgctctgaagtactggggtgccacaacaacaacaaattttccagtgagtaactacgaaaaggagctcgaggacatgaagcacatgacaaggcaggagtttgtagcgtctctgagaaggaagagcagtggtttctccagaggtgcatccatttacaggggagtgactaggcatcaccaacatggaagatggcaagcacggattggacgagttgcagggaacaaggatctttacttgggcaccttcagcacccaggaggaggcagcggaggcgtacgacatcgcggcgatcaagttccgcggcctcaacgccgtcaccaacttcgacatgagccgctacgacgtgaagagcatcctggacagcagcgccctccccatcggcagcgccgccaagcgcctcaaggaggccgaggccgcagcgtccgcgcagcaccaccacgccggcgtggtgagctacgacgtcggccgcatcgcctcgcagctcggcgacggcggagccctggcggcggcgtacggcgcgcactaccacggcgccgcctggccgaccatcgcgttccagccgggcgccgccagcacaggcctgtaccacccgtacgcgcagcagccaatgcgcggcggcgggtggtgcaagcaggagcaggaccacgcggtgatcgcggccgcgcacagcctgcaggacctccaccacctgaacctgggcgcggccggcgcgcacgactttttctcggcagggcagcaggccgccgccgctgcgatgcacggcctgggtagcatcgacagtgcgtcgctcgagcacagcaccggctccaactccgtcgtctacaacggcggggtcggcgacagcaacggcgccagcgccgtcggcggcagtggcggtggctacatgatgccgatgagcgctgccggagcaaccactacatcggcaatggtgagccacgagcaggtgcatgcacgggcctacgacgaagccaagcaggctgctcagatggggtacgagagctacctggtgaacgcggagaacaatggtggcggaaggatgtctgcatgggggactgtcgtgtctgcagccgcggcggcagcagcaagcagcaacgacaacatggccgccgacgtcgggcatggcggcgcgcagctcttcagtgtctggaacgacacttaagcgtacgtgccggcctggctctccgaaagggcgtattccagcacactggcggccgttactagacccaacctagacttgtccatcttctggattggccaacttaattaatgtatgaaataaaaggatgcacacatagtgacatgctaatcactataatgtgggcatcaaagttgtgtgttatgtgtaattactagttatctgaataaaagagaaagagatcatccatatttcttatcctaaatgaatgtcacgtgtctttataattctttgatgaaccagatgcatttcattaaccaaatccatatacatataaatattaatcatatataattaatatcaattgggttagcaaaacaaatctagtctaggtgtgttttgcgaatgcggcctccgggcacccagctttcttgtacaaagtggccgttaacggatcggccagaatggcccggaccgggttaccccgcggttcaaagccaatgactgttgttaggtccagtttctaaggacgaatcatccaatcactggttctttctgaacaaaacaaagagctatagagttacgttactgtagccgagacagagcctgcaatctggttatgccacatactaggttctttcttaaagttgactcactctatcctaagttctacttacaaggagctacaacaaattggtcataaccggagagcgttcaaggaggtaatatcccatcttactctgtagcaaggctacaaaaggagagctaaagaactaggctacaaaaagagagctaaagaactaactatctagcaagactacagagctatagtgtagagatttcataaccggtgagcgttcaaggatactttgaagagaagaggtaatatctcaactagcaagactacaaaaaaatggagatataaaactaactgtctaacaagactacagagctatagtagagatagatacgttcgacacttaagcatgagaattcgagctcggtaccctggttcacaaactcaatacaacacacagtggagtagggtattacgctccggcggcccgaaccactctaaatccttgtgtcctcgtgtgctcttccaccattaatgactgtaattgcagggacacgaagagttgtagcgcttttgccaacaagatccgctatatgctagtagagtggaacctgcacagcaacaagcatccaataatctgagaataagaattatgtgtggtgatggttctcatctctgcaactcgccattttcgcgagagaaccaaatccaagttggtgaagatcatgatttgggctcatgggctggcatagtagctattacctttgcaattgtggttcgaatctatccgatattctccttttcagggagagctaatgcttatgcttattgggtattttggtttgacactgcttcacgcccaaaaaaaggcaactatgtctgagttggatatggcccaaaaaaaggcagctatgtctgagttggatatggaagtcttctttcgtttagggtgaagtaagaccaagctcatgagcttattatcttaggtcggaacaaattagttgataggcatggcacatttatcaaattataatgattttaacagaaaagcaacacctctttttcagcagcaccagctttgcaagctgcaattgacactccaagcatagtatttgctccaaactcagcctgcatttcgcacaatatcatatctatttccatttggataaaatatattttccagaaatatgggaacagaatcaagatacagaaaaaagttgtggtagtagtggtaagtggaaacacaagtacagtgaaaagatagcattatttctgaacagtcaaattaaccgaaataagtagtatcacatactgcccctaaattgactacacccaatgtaaagaattgcttgagcatattgagccatcagttgtttgtttgtgtaacggatttgacaatgcagagttcaggagcaaaaaaccgcaaaggagagaaagagggaaaggatctcctagtatcccaccttgtggcgcgccctgtcaagtgcatgatggcctggtcgatctgcgtctgctgctgcggttccatcccaacgagtgcctccgacaccttgtcgttgatcacccgcaccgcgtaggcgacccccctggcgaggaacttccgcctctcggaggccccggccgcgtcggcggcggcgccctcgagcgcgcccacgctagccgtagatgctcggtgcacggccttgttggtgtgcaactcgacctcaacggccggtgcgctacgcccgtcaaggatctggcgcgcccgcaccctcgtgatcacggtgggcgcctcccgcctcatgtggccgacgatgaaaagcgccgggttaggggccttggcgcgcaccgccgtattcagggcctcctcgctcttgcgcgagagcaggtgcttccccaggtactcctgcactgacaaggctgccacagcggtggaatttgtcctcacgacttcgccacgtcgtcctcacctccctggcttcccacgactccgccgtatcgaggtgctcggtgggtcgtcttaatccgaagtccgaactaggaagacgagacagagaggtctgaggaatgggcctcgtttgatgttgagctgaattatttttccagcataagcccaggtcttggtccatgaacaaaattactagaaacccagcccagtactacgatctaaaagagggactgccactggatagctctctctagcattctccacgctccaatacagcggcgtcgtgtctatccgggtctatccgcgaacacgtgagaactctccagaaactgctttctcctccacttcatctctctcgctttccctctataaaaagaccccttctaggaattgagggagacagcaagcaccaagcagcgatccgaagctcaatcaattcactcaaacctcttccccaaatcttcgattagatcttcgttgacaagaagactagaaccgaacctgacatgtccaacctgctcacggttcaccagaaccttccggctcttccagtggacgcgacgtccgatgaagtcaggaagaacctcatggacatgttccgcgacaggcaagcgttcagcgagcacacctggaagatgctgctctccgtctgccgctcctgggctgcatggtgcaagctgaacaacaggaagtggttccccgctgagcccgaggacgtgagggattaccttctgtacctgcaagcgcgaggtttgtttctgcttctacctttgatatatatataataattatcattaattagtagtaatataatatttcaaatatttttttcaaaataaaagaatgtagtatatagcaattgcttttctgtagtttataagtgtgtatattttaatttataacttttctaatatatgaccaaaacatggtgatgcctaggtctggcagtgaagaccatccagcaacaccttggacaactgaacatgcttcacaggcgctccggcctcccgcgccccagcgactcgaacgccgtgagcctcgtcatgcgccgcatcaggaaggaaaacgtcgatgccggcgaaagggcaaagcaggccctcgcgttcgagaggaccgatttcgaccaggtccgcagcctgatggagaacagcgacaggtgccaggacattaggaacctggcgttcctcggaattgcatacaacacgctcctcaggatcgcggaaattgcccgcattcgcgtgaaggacattagccgcaccgacggcggcaggatgcttatccacattggcaggaccaagacgctcgtttccaccgcaggcgtcgaaaaggccctcagcctcggagtgaccaagctcgtcgaacgctggatctccgtgtccggcgtcgcggacgacccaaacaactacctcttctgccgcgtccgcaagaacggggtggctgcccctagcgccaccagccaactcagcacgagggccttggaaggtattttcgaggccacccaccgcctgatctacggcgcgaaggatgacagcggtcaacgctacctcgcatggtccgggcactccgcccgcgttggagctgctagggacatggcccgcgccggtgtttccatccccgaaatcatgcaggcgggtggatggacgaacgtgaacattgtcatgaactacattcgcaaccttgacagcgagacgggcgcaatggttcgcctcctggaagatggtgactgaggtacccaacctagacttgtccatcttctggattggccaacttaattaatgtatgaaataaaaggatgcacacatagtgacatgctaatcactataatgtgggcatcaaagttgtgtgttatgtgtaattactagttatctgaataaaagagaaagagatcatccatatttcttatcctaaatgaatgtcacgtgtctttataattctttgatgaaccagatgcatttcattaaccaaatccatatacatataaatattaatcatatataattaatatcaattgggttagcaaaacaaatctagtctaggtgtgttttgcgatccgatatcgaattggccacggtaccagctgctgctgttctagggttcacaagtctgcctatttgtcttccccaatggagctatggttgtctggtctggtccttggtcgtgtcccgtttcattgtgtactatttacctgtaatgtgtatccttaagtctggtttgatggtgtctgaaacgttttgctgtggtagagcagcatggaagaactataatgaataagtgatccctaatcattgtgtccaaattttgcttctgctatacccttttgtgctgtttcttatgttttgcttaaaaatttgatctgacaaacaaatttgtctaaattatgctcttgttctgactgtgtactgtacacatttgtattgctaccggtttggcacatagttttctctttgattgcagatcaaacccttctgattgcagattgcttggctatggctgatgtgctcactgttcttctttagcttgtatattgctgatggtggcttggctacggctgaaaaagttgctgctgcgccgacttggcaactgttgctccagtaatgctttgtcctctcttcctagccgccgacttggcacttggcagctgttgctcctgtaatgcgttgttatctcttatctcttgagatgtactatgattttgaggctgtttgacttgtgccagattgccagtgctgatgctatattatctcaggtttttatgctagtatatgttttactgtgtgctgcctgtgtcgagttacgtaatctattgaaccgctatgcgtgttgatgccctgttgttgcttgccagattgatgcccctgttgcttgcagcttgcaagctgtagtgaaatcctaaaattccaaaccaaatctattctgaacttttgaagatctgtgatgtccggaagaaaagattcaaacagataaacgggactctccagaatctataaaataaatgatcgacaaacgctttgctttggtaggcttcaagcttggtcacccggtccgggcctagaaggccagcttcggccgccccgggcaactttattatacaaagttgatagataaatcagatatctggttcctaaggacccggcggaccgattaaactgattcggtccgacgcgttacctaataacttcgtatagcatacattatacgaagttattagctaactaactagtaagcttaagccatgggtcgacggatccgttaactagcgtggcatttggcaccgccgcacactatgcgagctaggagtgctagtttacagatgaaactatgaaaccaagaaaacacaattgtccgtagctagcgcgtggcgtcgtgtcaagcttcacacagtatcttcgttcttcactataaatcgcgcctgttgttcgtgagacccaccaccgtggataacagtcccctaataataagcgatcaacagcactgctgatggctgaacaccgaggcgccgccgcgcgtaaccatccgccggagcagcccgtcgtgccggcgaacgacgccttccccgaccgcgcccagcagctctgcctcgacgccgggcgcgcgctcgcgatgtgcggcgtgctcgtcgccgtccctcccgcattttacgcgtcgacgtcgcggacgacaccgcacttgccttcgtcggcttcgtcctctggatcatcggtgcgtggctgtgcctcctggcgctcacgcccttggctccacgggcggtgagggcgggcggggccgccgccagcaccttgctgatcaggtgcctgtccctttcatgaactactagcgcccgcgcccgcggccgccgggcacaagagaacacatcgatgttcgctgcgtacgtcagcaataaggcactctttgtcagtagtcgagtgcatatgttgggtgtttgccctgggagatttcaagtgttgtggccattatcccgcaggataaaaaatcggcggcttttggattgatacggaaaataacgatgtttcatgctcgtgttgtgtgtgtgacatcttgtcagccaagtttttaaccgttgctactccccctctgtgggctcagtgtgtggaccggaatacgtcgtacataggccgtagcctaagcccaatatgccgtttttcaggttggcctgtgtgacgacaagcgggtctcaaaagcccatcacgcaactggcctgcaattattggaggagagcgcgtcgagttggttccagaggctgcgtggtggggccggactctgcgacgacctctcgttcgcgtccgatttggttgccgtgagccgtgacgtaacgcctccttccgttcctccctatataagttccacccccgggtccggtttccccaagccccagtgacccccgatcccgatcgcgaaatctccgcacccgccggcaagggaccgaagcaagcctctctcccgaccgtcgcatcaaggtacgcgtccgctcgatctgtcctcttccttctcgatttgacttgctgtggtgcccgatcacgggatcagaatcgcaccagtgtagatttcgcatgttctaagatgtgttagtttccaggctaatccagttctcttgacgcccgatccgatcgagctccgtgtttatttcagcctaatcgtagtattcccctaaaatttcctcattagggggttcgcaagattgttggtcgacaggttcacttatgctcgatcgcttacttttagtcgattcatgctgcgtactattgttgccccccgtggttttatcttttctcgtgtgaaatccagtagatatagtagatatcgtagcattaggttttaattcaatcgattgattattgtatcatcaaaattgagaagttcgaatcatgcctatcatgctgcctcaaccgaaatcctgtatattgaagtttcaattcaattgattgatcattcattagattcaaccaaaatctagaaggttagatgacgcatgtcatgctgcctgcgtagtttacctttgatctgtttatgattaccttatcagtaggatatttgtgattttgggaagtagcactaactgattcatgctgacatgatgttccctttcagattatactgttgagtcctatctaattgatgctttgtatgctatatgaatacgtcatggtaaattagcagttaattagcatattagcaattgggcgtacctcatcaggattgctcttgtagatgtgtgtggtgatgtttcttgttcaattcatgttctgctttaaaagtatgtgttctctgtttgttaattaagattcatggttataatgatttggacctaattaatcagggttgcccttttagatgcgtggttacttgttgagttcatttttttcctgctatagttgtatgcgtttgttcattcatggttagatttgatttgtttcttctctattccatgccttccatatacttcaattgtagcttaacatgagatttctgtatatgcaggtcgaccgccggggatccacacgacaccatggcccagtccaagcacggcctgaccaaggagatgaccatgaagtaccgcatggagggctgcgtggacggccacaagttcgtgatcaccggcgagggcatcggctaccccttcaagggcaagcaggccatcaacctgtgcgtggtggagggcggccccttgcccttcgccgaggacatcttgtccgccgccttcatgtacggcaaccgcgtgttcaccgagtacccccaggacatcgtcgactacttcaagaactcctgccccgccggctacacctgggaccgctccttcctgttcgaggacggcgccgtgtgcatctgcaacgccgacatcaccgtgagcgtggaggagaactgcatgtaccacgagtccaagttctacggcgtgaacttccccgccgacggccccgtgatgaagaagatgaccgacaactgggagccctcctgcgagaagatcatccccgtgcccaagcagggcatcttgaagggcgacgtgagcatgtacctgctgctgaaggacggtggccgcttgcgctgccagttcgacaccgtgtacaaggccaagtccgtgccccgcaagatgcccgactggcacttcatccagcacaagctgacccgcgaggaccgcagcgacgccaagaaccagaagtggcacctgaccgagcacgccatcgcctccggctccgccttgccctccggactcagatctcgatagagtcaacctagacttgtccatcttctggattggccaacttaattaatgtatgaaataaaaggatgcacacatagtgacatgctaatcactataatgtgggcatcaaagttgtgtgttatgtgtaattactagttatctgaataaaagagaaagagatcatccatatttcttatcctaaatgaatgtcacgtgtctttataattctttgatgaaccagatgcatttcattaaccaaatccatatacatataaatattaatcatatataattaatatcaattgggttagcaaaacaaatctagtctaggtgtgttttgcgaattgcggcgcccttactttaacgcctctaaccaacacccctttatctttataaggaacaataaacagaatttgccccactgttctaaatcacctaataatatccccagctaaaaacaataaaggtttcctagaattaagacaagcatgactgttcctccaggagggtttggaacattgttgcagtcttgcagatacgggcgaagggtgagaaacagagcggagggctggaggtgacctcggtagtcgacgccggagttgagcttgacaacgacggggcggcccctgatggacttgaggaagtccgatggcgtcttcaccgtcccgccggcgcccgaggcgggcctgtcgctgccgccgccgccgctgctcatcttgcgcgctgtgcccccggcggtgtccctgtgttgcggatcgcgggtgggccaggtggatgcgagggcgacccgtttggactccggccggagccgccggatccctggtcggtgtcagtgccgtttactctgggccccacgtgtcagtaccgtctgtagatgacaacaacccgtcgtccacagtcatgtccaaaatatcctttcttcttttttttcgattcggatatctatcttccttttttttttccaaaaatcttcttgacgcaccagcgcgcacgtttgtggtaaacgccgacacgtcggtcccacgtcgatagaccccacccaccagtgagtagcgtgtacgtattcgggggtgacggacgtgtcgccgtcgtcttgctagtcccattcccatctgagccacacatctctgaacaaaaaaaaggagggaggcctccacgcacatccccctccgtgccacccgccccaaaccctcgcgccgcctccgagacagccgccgcaaccatggccaccgccgccgccgcgtctaccgcgctcactggcgccactaccgctgcgcccaaggcgaggcgccgggcgcacctcctggccacccgccgcgccctcgccgcgcccatcaggtgctcagcggcgtcacccgccatgccgatggctcccccggccaccccgctccggccgtggggccccaccgagccccgcaagggtgctgacatcctcgtcgagtccctcgagcgctgcggcgtccgcgacgtcttcgcctaccccggcggcgcgtccatggagatccaccaggcactcacccgctcccccgtcatcgccaaccacctcttccgccacgagcaaggggaggcctttgccgcctccggctacgcgcgctcctcgggccgcgtcggcgtctgcatcgccacctccggccccggcgccaccaacctagtctccgcgctcgccgacgcgctgctcgattccgtccccatggtcgccatcacgggacaggtggcgcgacgcatgattggcaccgacgccttccaggagacgcccatcgtcgaggtcacccgctccatcaccaagcacaactacctggtcctcgacgtcgacgacatcccccgcgtcgtgcaggaggctttcttcctcgcctcctctggtcgaccagggccggtgcttgtcgacatccccaaggacatccagcagcagatggcggtgcctgtctgggacaagcccatgagtctgcctgggtacattgcgcgccttcccaagccccctgcgactgagttgcttgagcaggtgctgcgtcttgttggtgaatcgcggcgccctgttctttatgtgggcggtggctgcgcagcatctggtgaggagttgcgacgctttgtggagctgactggaatcccggtcacaactactcttatgggcctcggcaacttccccagcgacgacccactgtctctgcgcatgctaggtatgcatgggacggtgtatgcaaattatgcagtggataaggccgatctgttgcttgcacttggtgtgcggtttgatgatcgcgtgacagggaagattgaggcttttgcaagcagggctaagattgtgcacgttgatattgatccggctgagattggcaagaacaagcagccacatgtgtccatctgtgcagatgttaagcttgctttgcagggcatgaatgctcttcttgaaggaagcacatcaaagaagagctttgactttggctcatggaacgatgagttggatcagcagaagagggaattcccccttgggtataaaacatctaatgaggagatccagccacaatatgctattcaggttcttgatgagctgacgaaaggcgaggccatcatcggcacaggtgttgggcagcaccagatgtgggcggcacagtactacacttacaagcggccaaggcagtggttgtcttcagctggtcttggggctatgggatttggtttgccggctgctgctggtgcttctgtggcaaacccaggtgtcactgttgttgacatcgatggagatggtagctttctcatgaacgttcaggagctagctatgatccgaattgagaacctcccagtgaaggtctttgtgctaaacaaccagcacctggggatggtggtgcagttggaggacaggttctataaggccaacagagcgcacacatacttgggaaacccagagaatgaaagtgagatatatccagatttcgtgacgatcgccaaagggttcaacattccagcggtccgtgtgacaaagaagaacgaagtccgcgcagcgataaagaagatgctcgagactccagggccgtacctcttggatataatcgtcccacaccaggagcatgtgttgcctatgatccctagtggtggggctttcaaggatatgatcctggatggtgatggcaggactgtgtactgactagctagtcagttaacagatctgccagatcctcggtgtacaaataacccgtcttatcctatgagacgggccggcgtcagtgtgttctggaggaatttttatgtcagagcctttttctttgtgtgcttgatgtagatgccaagggaagcttattggctgttgaagcttgatgcaaaataaattatggaactctgttttttgtttatctaataataactagcaaatatgcttccattgcattgaaactaacagccttttgtgtttccaagttttattttgtgacaatgtcatctatttcaattagttgtggaatcggaaacttgcaggactaacttggaaactccaatccctcagcatcctggactttttcctggtgtaatccatgtagatattattttaatcatcattttagttctggaggtttttccatctccggttttgctcccctttcttcaaaaaaaaaaaaaaaatgccgtaggcgccgcaacgcccacctgttgttcaaactcatgggcacgagtggctcgaagattttatacaacaattgctgtagtttcaccgttgctggtgaagaagcatttttttaaaaaaatatagtggtattcattttaattagtttagttgtgcagcgagcaaaatttggacatgctctgctcggaatctgatcgacctagacacagattagcagcagtagctttgtcatctgttccaagagttgcgatctgatagaagaaaaaaaaaccttcccttcaatgtaaaaccgaaactaacaagaaagaagcacagtgccgtttaggcaagtatggagtacgtattaagcatgtagaaggccatgcatgaaccactaacaagaaagaagcgcagtgccattcaggcaagcataagcatgtagattggcatgcatgaacaactaacagtagatcgtctctggtctgattagaagttttttgggaagccaagaaatcatgtacaactggttccatctcaaattccgtggcaaaaagaggcctaagcaacatacctcgagtagatcacattcaagcttggtcacccggtccgtcaatattctgattccgatgacttcgtaggttcctagctcaagccgctcgtgtccaagcgtcacttacgattagctaatgattacggcatctaggaccgactagtggcgcgccgactagctagctaaggtaccgagctcgaattcattccgattaatcgtggcctcttgctcttcaggatgaagagctatgtttaaacgtgcaagcgctactagacaattcagtacattaaaaacgtccgcaatgtgttattaagttgtctaagcgtcaatttgtttacaccacaatatatcctgcca

SEQ ID NO: 275 - DNA, 20683 bp, Artificial Sequence
  PHP98229
gtttacccgccaatatatcctgtcaaacactgcggccgcacttgaccgcggatggagccggagctgtggtgaggccatcgacgggaggtgggggagaacacagtctcagtgttctttgtgagtccgcaaggtttttagcttttctgtattaattaaggttgctgttggctgtagaatacggtcgtggaagagctgtatcggtagctactacgtaagctattatatactggaagtctggagctcgtcgatctccggtcgtcttcctccatttctcctcgtcttgctttgactgctgctaccatttgcttctgttttctgatgaagcatgccatgtcggccaccagtgtttgtgtggtttttgcagggaatggctttcaagtgctgtgattgaatggccctcgtcgtcctcggctgagctcacatggacgcgtcatgtgagtgagatatatgatcatatgatgagtggggttcgggtgagtgcgtacttgaagtaggatcccgctttcactcattcattcattggcctttaaaccgggaaattttcgcgaggagatggagggaagcaagcagggtgacgagtgcagagtgccgcgagcgctttgtcaaaaggcaccgccgtaggcaaaaaaatcaatggccctgactgactcgatggtagtactactgtagagactagagagggttgctccccatatcttcgtgtgacttttactccagcattgcatttccgtcattgagacgttaattaatagcagctttcgggacagatgactgtggccatgtttcgtcacggccgcttcgtgccagctgggggtactatagtactgtgattttgttagtaaaaactttcattaggccaccattgacgaccgggccttcgcttttgctgcgctaattaaccatttcccggcgaccgaagggaacatgaacatgccccgacacatgagggcatgaggactagtgttctccctgtcgttcgttgacttgactagtgatagtttaaacgctcttcaactggaagagcggttactaccggttcactagctagctgctaatcgagctagttaccctatgaggtgacatgaagcgctcacggttactatgacggttagcttcacgactgttggtggcagtagcgtacgacttagctatagttccggacttacctagctaataacttcgtatagcatacattatacgaagttatggttaccgagctgttaccaagcggccgcacactgatagtttaaactgaaggcgggaaacgacaatctgatcatgagcggagaattaagggagtcacgttatgacccccgccgatgacgcgggacaagccgttttacgtttggaactgacagaaccgcaacgattgaaggagccactcagccgcgggtttctggagtttaatgagctaagcacatacgtcagaaaccattattgcgcgttcaaaagtcgcctaaggtcactatcagctagcaaatatttcttgtcaaaaatgctccactgacgttccataaattcccctcggtatccaattagagtctcatattcactcccatggcggccaatgcgggcggcggtggagcgggaggaggcagcggcagcggcagcgtggctgcgccggcggtgtgccgccccagcggctcgcggtggacgccgacgccggagcagatcaggatgctgaaggagctctactacggctgcggcatccggtcgcccagctcggagcagatccagcgcatcaccgccatgctgcggcagcacggcaagatcgagggcaagaacgtcttctactggttccagaaccacaaggcccgcgagcgccagaagcgccgcctcaccagcctcgacgtcaacgtgcccgccgccggcgcggccgacgccaccaccagccaactcggcgtcctctcgctgtcgtcgccgccgccttcaggcgcggcgcctccctcgcccaccctcggcttctacgccgccggcaatggcggcggatcggctgtgctgctggacacgagttccgactggggcagcagcggcgctgctatggccaccgagacatgcttcctgcaggactacatgggcgtgacggacacgggcagctcgtcgcagtggccacgcttctcgtcgtcggacacgataatggcggcggccgcggcgcgggcggcgacgacgcgggcgcccgagacgctccctctcttcccgacctgcggcgacgacggcggcagcggtagcagcagctacttgccgttctggggtgccgcgtccacaactgccggcgccacttcttccgttgcgatccaacagcaacaccagctgcaggagcagtacagcttttacagcaacagcaacagcacccagctggccggcaccggcaaccaagacgtatcggcaacagcagcagcagccgccgccctggagctgagcctcagctcatggtgctccccttaccctgctgcagggagtatgtgagagcaacgcgagctgccactgctcttcactgatgtctctggaatggaaggaggaggaagtgagaacagatcattcgacaaagcagcattagtccgttgatcggtggaagaccactcgtcagtgttgagttgaatgtttgatcaataaaatacggcaatgctgtaagggttgttttttatgccattgataatacactgtactgttcagttgttgaactctatttcttagccatgccaagtgcttttcttattttgaataacattacagcaaaaagttgaaagacaaaaaaaaaaacccccgaacagagtgctttgggtcccaagcttctttagactgtgttcggcgttccccctaaatttctccccctatatctcactcacttgtcacatcagcgttctctttccccctatatctccacgctctacagcagttccacctatatcaaacctctataccccaccacaacaatattatatactttcatcttcaactaactcatgtaccttccaatttttttctactaataattatttacgtgcacagaaacttagcaaggagagagagagcgggaatttaaatgctcggcgttaggcttttagtccgctaggtggctagaccgaggttaggacgctagttcactaggggcctagtggtgttttaagacgtcacggtcaccaccttgctagttggatattacctcttctcttcaaagtatccttgaacgctcaccggttatcaaatctctacactatagctctgtagtcttgctagatagttagttctttagctctccgcgaccgaagcttgcatgggccgcatcgagcagctggcttgtggggaccagacaaaaaaggaatggtgcagaattgttaggcgcacctaccaaaagcatctttgcctttattgcaaagataaagcagattcctctagtacaagtggggaacaaaataacgtggaaaagagctgtcctgacagcccactcactaatgcgtatgacgaacgcagtgacgaccacaaaactcgagcaacgagatcatgagccaatcaaagaggagtgatgtagacctaaagcaataatggagccatgacgtaagggcttacgcccatacgaaataattaaaggctgatgtgacctgtcggtctctcagaacctttactttttatgtttggcgtgtatttttaaatttccacggcaatgacgatgtgaccgtcgacccactaaaacattgctttgtcaaaagctaaaaaagatgatgcccgacagccacttgtgtgaagcatgagaagccggtccctccactaagaaaattagtgaagcatcttccagtggtccctccactcacagctcaatcagtgagcaacaggacgaaggaaatgacgtaagccatgacgtctaatcccagggccagcttgcatgcctgcagtgcagcgtgacccggtcgtgcccctctctagagataatgagcattgcatgtctaagttataaaaaattaccacatattttttttgtcacacttgtttgaagtgcagtttatctatctttatacatatatttaaactttactctacgaataatataatctatagtactacaataatatcagtgttttagagaatcatataaatgaacagttagacatggtctaaaggacaattgagtattttgacaacaggactctacagttttatctttttagtgtgcatgtgttctcctttttttttgcaaatagcttcacctatataatacttcatccattttattagtacatccatttagggtttagggttaatggtttttatagactaatttttttagtacatctattttattctattttagcctctaaattaagaaaactaaaactctattttagtttttttatttaataatttagatataaaatagaataaaataaagtgactaaaaattaaacaaataccctttaagaaattaaaaaaactaaggaaacatttttcttgtttcgagtagataatgccagcctgttaaacgccgtcgacgagtctaacggacaccaaccagcgaaccagcagcgtcgcgtcgggccaagcgaagcagacggcacggcatctctgtcgctgcctctggacccctctcgagagttccgctccaccgttggacttgctccgctgtcggcatccagaaattgcgtggcggagcggcagacgtgagccggcacggcaggcggcctcctcctcctctcacggcaccggcagctacgggggattcctttcccaccgctccttcgctttcccttcctcgcccgccgtaataaatagacaccccctccacaccctctttccccaacctcgtgttgttcggagcgcacacacacacaaccagatctcccccaaatccacccgtcggcacctccgcttcaaggtacgccgctcgtcctcccccccccccctctctaccttctctagatcggcgttccggtccatgcatggttagggcccggtagttctacttctgttcatgtttgtgttagatccgtgtttgtgttagatccgtgctgctagcgttcgtacacggatgcgacctgtacgtcagacacgttctgattgctaacttgccagtgtttctctttggggaatcctgggatggctctagccgttccgcagacgggatcgatttcatgattttttttgtttcgttgcatagggtttggtttgcccttttcctttatttcaatatatgccgtgcacttgtttgtcgggtcatcttttcatgcttttttttgtcttggttgtgatgatgtggtctggttgggcggtcgttctagatcggagtagaattctgtttcaaactacctggtggatttattaattttggatctgtatgtgtgtgccatacatattcatagttacgaattgaagatgatggatggaaatatcgatctaggataggtatacatgttgatgcgggttttactgatgcatatacagagatgctttttgttcgcttggttgtgatgatgtggtgtggttgggcggtcgttcattcgttctagatcggagtagaatactgtttcaaactacctggtgtatttattaattttggaactgtatgtgtgtgtcatacatcttcatagttacgagtttaagatggatggaaatatcgatctaggataggtatacatgttgatgtgggttttactgatgcatatacatgatggcatatgcagcatctattcatatgctctaaccttgagtacctatctattataataaacaagtatgttttataattattttgatcttgatatacttggatgatggcatatgcagcagctatatgtggatttttttagccctgccttcatacgctatttatttgcttggtactgtttcttttgtcgatgctcaccctgttgtttggtgttacttctgcaggtcgactttaacttagcctaggatccatggccactgtgaacaactggctcgctttctccctctccccgcaggagctgccgccctcccagacgacggactccacactcatctcggccgccaccgccgaccatgtctccggcgatgtctgcttcaacatcccccaagattggagcatgaggggatcagagctttcggcgctcgtcgcggagccgaagctggaggacttcctcggcggcatctccttctccgagcagcatcacaaggccaactgcaacatgatacccagcactagcagcacagtttgctacgcgagctcaggtgctagcaccggctaccatcaccagctgtaccaccagcccaccagctcagcgctccacttcgcggactccgtaatggtggcttcctcggccggtgtccacgacggcggtgccatgctcagcgcggccgccgctaacggtgtcgctggcgctgccagtgccaacggcggcggcatcgggctgtccatgattaagaactggctgcggagccaaccggcgcccatgcagccgagggtggcggcggctgagggcgcgcaggggctctctttgtccatgaacatggcggggacgacccaaggcgctgctggcatgccacttctcgctggagagcgcgcacgggcgcccgagagtgtatcgacgtcagcacagggtggagccgtcgtcgtcacggcgccgaaggaggatagcggtggcagcggtgttgccggcgctctagtagccgtgagcacggacacgggtggcagcggcggcgcgtcggctgacaacacggcaaggaagacggtggacacgttcgggcagcgcacgtcgatttaccgtggcgtgacaaggcatagatggactgggagatatgaggcacatctttgggataacagttgcagaagggaagggcaaactcgtaagggtcgtcaagtctatttaggtggctatgataaagaggagaaagctgctagggcttatgatcttgctgctctgaagtactggggtgccacaacaacaacaaattttccagtgagtaactacgaaaaggagctcgaggacatgaagcacatgacaaggcaggagtttgtagcgtctctgagaaggaagagcagtggtttctccagaggtgcatccatttacaggggagtgactaggcatcaccaacatggaagatggcaagcacggattggacgagttgcagggaacaaggatctttacttgggcaccttcagcacccaggaggaggcagcggaggcgtacgacatcgcggcgatcaagttccgcggcctcaacgccgtcaccaacttcgacatgagccgctacgacgtgaagagcatcctggacagcagcgccctccccatcggcagcgccgccaagcgcctcaaggaggccgaggccgcagcgtccgcgcagcaccaccacgccggcgtggtgagctacgacgtcggccgcatcgcctcgcagctcggcgacggcggagccctggcggcggcgtacggcgcgcactaccacggcgccgcctggccgaccatcgcgttccagccgggcgccgccagcacaggcctgtaccacccgtacgcgcagcagccaatgcgcggcggcgggtggtgcaagcaggagcaggaccacgcggtgatcgcggccgcgcacagcctgcaggacctccaccacctgaacctgggcgcggccggcgcgcacgactttttctcggcagggcagcaggccgccgccgctgcgatgcacggcctgggtagcatcgacagtgcgtcgctcgagcacagcaccggctccaactccgtcgtctacaacggcggggtcggcgacagcaacggcgccagcgccgtcggcggcagtggcggtggctacatgatgccgatgagcgctgccggagcaaccactacatcggcaatggtgagccacgagcaggtgcatgcacgggcctacgacgaagccaagcaggctgctcagatggggtacgagagctacctggtgaacgcggagaacaatggtggcggaaggatgtctgcatgggggactgtcgtgtctgcagccgcggcggcagcagcaagcagcaacgacaacatggccgccgacgtcgggcatggcggcgcgcagctcttcagtgtctggaacgacacttaagcgtacctagtggtacctgacatcttatagtctgcaacctctcgtgtctgaattcctatctttatcaagtgttattgcttccacgactataggacagctttcgtcgaaagcttttgctcatgtgatctcgaaggattcatctagtctgatttttcgtgacttgtatcggttttattggattcatccaacatatatcaataaaaaatgagttgtgtttcctttcttcctagttcagttaaaattatttccctcctgcgcttgtgctgtaattgtctgtgtacctgttgtttgtgactgtgttagttcccttggatatgatttcgtatttgatatgtacatggagatagcttagcttcattattggagtatgaagttagtatgacatagtcactctcctggaaaattgacactgcaaaccatatttttattctgaaccacaaatcctagtcagtccgctggcatatgccgtccgtttgctgaatccagaacgtgggtttggagatgtacggctgagatgcctctatgcgaaggggatttcgtggtgaaacgagatgggagtagagcaacgcccgtggaagatgcttcaaacttccacacttttgagcaacgatcggcagtagtaaggtagacgatttcaagatcaaagcatatgaagataaacaacatcaacaacaaaatttgttggggttctatagagagaaacagagctacatacatacactgttttgtatctaccatctgagatgatgaaaagatgaaaaactaaagaatgccccggcgccaacgccaggacacgccgcgcgcgcgtcacccgagccatctcttgacccagccggcgctgtatatttacacacgttgcagcatcgatcaccacctgttcgatcgcgtcgccgtcaccggcgcgccgcgacttattgaactagtctagggcgcggctaacaacctagcttagattgccttgtctaaacccttaggctaacgcgccactctagaaggccgatctcccccgaacgcgccagatccgatatcgatgggccctggccgaagcttggtcacccgcaccttgctagttggatattacctcttctcttcaaagtatccttgaacgctcaccggttatcaaatctctacactatagctctgtagtcttgctagatagttagttctttagctctctctagaggttcacaaactcaatacaacacacagtggagtagggtattacgctccggcggcccgaaccactctaaatccttgtgtcctcgtgtgctcttccaccattaatgactgtaattgcagggacacgaagagttgtagcgcttttgccaacaagatccgctatatgctagtagagtggaacctgcacagcaacaagcatccaataatctgagaataagaattatgtgtggtgatggttctcatctctgcaactcgccattttcgcgagagaaccaaatccaagttggtgaagatcatgatttgggctcatgggctggcatagtagctattacctttgcaattgtggttcgaatctatccgatattctccttttcagggagagctaatgcttatgcttattgggtattttggtttgacactgcttcacgcccaaaaaaaggcaactatgtctgagttggatatggcccaaaaaaaggcagctatgtctgagttggatatggaagtcttctttcgtttagggtgaagtaagaccaagctcatgagcttattatcttaggtcggaacaaattagttgataggcatggcacatttatcaaattataatgattttaacagaaaagcaacacctctttttcagcagcaccagctttgcaagctgcaattgacactccaagcatagtatttgctccaaactcagcctgcatttcgcacaatatcatatctatttccatttggataaaatatattttccagaaatatgggaacagaatcaagatacagaaaaaagttgtggtagtagtggtaagtggaaacacaagtacagtgaaaagatagcattatttctgaacagtcaaattaaccgaaataagtagtatcacatactgcccctaaattgactacacccaatgtaaagaattgcttgagcatattgagccatcagttgtttgtttgtgtaacggatttgacaatgcagagttcaggagcaaaaaaccgcaaaggagagaaagagggaaaggatctcctagtatcccaccttgtggcgcgccctgtcaagtgcatgatggcctggtcgatctgcgtctgctgctgcggttccatcccaacgagtgcctccgacaccttgtcgttgatcacccgcaccgcgtaggcgacccccctggcgaggaacttccgcctctcggaggccccggccgcgtcggcggcggcgccctcgagcgcgcccacgctagccgtagatgctcggtgcacggccttgttggtgtgcaactcgacctcaacggccggtgcgctacgcccgtcaaggatctggcgcgcccgcaccctcgtgatcacggtgggcgcctcccgcctcatgtggccgacgatgaaaagcgccgggttaggggccttggcgcgcaccgccgtattcagggcctcctcgctcttgcgcgagagcaggtgcttccccaggtactcctgcactgacaaggctgccacagcggtggaatttgtcctcacgacttcgccacgtcgtcctcacctccctggcttcccacgactccgccgtatcgaggtgctcggtgggtcgtcttaatccgaagtccgaactaggaagacgagacagagaggtctgaggaatgggcctcgtttgatgttgagctgaattatttttccagcataagcccaggtcttggtccatgaacaaaattactagaaacccagcccagtactacgatctaaaagagggactgccactggatagctctctctagcattctccacgctccaatacagcggcgtcgtgtctatccgggtctatccgcgaacacgtgagaactctccagaaactgctttctcctccacttcatctctctcgctttccctctataaaaagaccccttctaggaattgagggagacagcaagcaccaagcagcgatccgaagctcaatcaattcactcaaacctcttccccaaatcttcgattagatcttcgttgacaagaagactagaaccgaacctgacatgtccaacctgctcacggttcaccagaaccttccggctcttccagtggacgcgacgtccgatgaagtcaggaagaacctcatggacatgttccgcgacaggcaagcgttcagcgagcacacctggaagatgctgctctccgtctgccgctcctgggctgcatggtgcaagctgaacaacaggaagtggttccccgctgagcccgaggacgtgagggattaccttctgtacctgcaagcgcgaggtttgtttctgcttctacctttgatatatatataataattatcattaattagtagtaatataatatttcaaatatttttttcaaaataaaagaatgtagtatatagcaattgcttttctgtagtttataagtgtgtatattttaatttataacttttctaatatatgaccaaaacatggtgatgcctaggtctggcagtgaagaccatccagcaacaccttggacaactgaacatgcttcacaggcgctccggcctcccgcgccccagcgactcgaacgccgtgagcctcgtcatgcgccgcatcaggaaggaaaacgtcgatgccggcgaaagggcaaagcaggccctcgcgttcgagaggaccgatttcgaccaggtccgcagcctgatggagaacagcgacaggtgccaggacattaggaacctggcgttcctcggaattgcatacaacacgctcctcaggatcgcggaaattgcccgcattcgcgtgaaggacattagccgcaccgacggcggcaggatgcttatccacattggcaggaccaagacgctcgtttccaccgcaggcgtcgaaaaggccctcagcctcggagtgaccaagctcgtcgaacgctggatctccgtgtccggcgtcgcggacgacccaaacaactacctcttctgccgcgtccgcaagaacggggtggctgcccctagcgccaccagccaactcagcacgagggccttggaaggtattttcgaggccacccaccgcctgatctacggcgcgaaggatgacagcggtcaacgctacctcgcatggtccgggcactccgcccgcgttggagctgctagggacatggcccgcgccggtgtttccatccccgaaatcatgcaggcgggtggatggacgaacgtgaacattgtcatgaactacattcgcaaccttgacagcgagacgggcgcaatggttcgcctcctggaagatggtgactgaggtacccaacctagacttgtccatcttctggattggccaacttaattaatgtatgaaataaaaggatgcacacatagtgacatgctaatcactataatgtgggcatcaaagttgtgtgttatgtgtaattactagttatctgaataaaagagaaagagatcatccatatttcttatcctaaatgaatgtcacgtgtctttataattctttgatgaaccagatgcatttcattaaccaaatccatatacatataaatattaatcatatataattaatatcaattgggttagcaaaacaaatctagtctaggtgtgttttgcgatccgatatcgacgtctaaaaacggcccctaactaacgcttagttgcccgctagattagtcccccgttagtgcctagttagacacacgacgaactaggggctagtgcgcacgataacttcgtatagcatacattatacgaagttataacagcggaccgggttaccgaattcctgcccttaaggccaattgttcaagattcattcaacaattgaaacatctcccatgattaaatcagtataaggttgctatggtcttgcttgacaaagtttttttttgagggaatttcaactaaatttttgagtgaaactatcaaatactgattttaaaaaatttttataaaaggaagcgcagagataaaaggccatctatgctacaaaagtacccaaaaatgtaatcctaaagtatgaattgcattttttttttgtttggacgaaaggaaaggagtattaccacaagaatgatatcatcttcatatttagatcttttttgggtaaagcttgagattctctaaatatagagaaatcagaagaaaaaaaaaccgtgttttggtggttttgatttctagcctccacaataactttgacggcgtcgacaagtctaacggacaccaagcagcgaaccaccagcgccgagccaagcgaagcagacggccgagacgttgacaccttcggcgcggcatctctcgagagttccgctccggcgctccacctccaccgctggcggtttcttattccgttccgttccgcctcctgctctgctcctctccacaccacacggcacgaaaccgttacggcaccggcagcacccagcacgggagaggggattcctttcccaccgttccttccctttccgccccgccgctataaatagccagccccatccccagcttttttccccaatctcatctcctctctcctgttgttcggagcacacgcacaatccgatcgatccccaaatccccttcgtctctcctcgcgagcctcgtggatcccagcttcaaggtacggcgatcgatcatcccccctccttctctctaccttcttttctctagactacatcggatggcgatccatggttagggcctgctagtttcccttcctgttttgtcgatggctgcgaggcacaatagatctgatggcgttatgacggctaacttgtcatgttgttgcgatttatagtccctttaggagatcagtttaatttctcggatggttcgagatcggtggtccatggttagtaccctaagatccgcgctgttagggttcgtagatggaggcgacctgttctgattgttaacttgtcagtacctgggaaatcctgggatggttctagctcgtccgcagatgagatcgatttcatgatcctctgtatcttgtttcgttgcctaggttccgtctaatctatccgtggtatgatgtagatgttttgatcgtgctaactacgtcttgtaaagttaattgtcaggtcataatttttagcatgcctttttttttgtttggttttgtctaattgggctgtcgttctagatcagagtagaagactgttccaaactacctgctggatttattgaacttggatctgtatgtgtgtcacatatcttcataaattcatgattaagatggattgaaatatcttttatctttttggtatggatagttctatatgttggtgtggctttgttagatgtatacatgcttagatacatgaagcaacgtgctgctactgtttagtaattgctgttcatttgtctaataaacagataaggatatgtatttatgttgctgttggttttgctggtactttgttggatacaaatgcttcaatacagaaaacagcatgctgctacgatttaccatttatctaatcttatcatatgtctaatctaataaacaaacatgcttttaaattatcttcatatgcttggatgatggcatacacagcggctatgtgtggttttttaaatacccagcatcatgggcatgcatgacactgctttaatatgctttttatttgcttgagactgtttcttttgtttatactgaccctttagttcggtgactcttctgcaggtcgactttaacttagcctaggatccatggcccagtccaagcacggcctgaccaaggagatgaccatgaagtaccgcatggagggctgcgtggacggccacaagttcgtgatcaccggcgagggcatcggctaccccttcaagggcaagcaggccatcaacctgtgcgtggtggagggcggccccttgcccttcgccgaggacatcttgtccgccgccttcatgtacggcaaccgcgtgttcaccgagtacccccaggacatcgtcgactacttcaagaactcctgccccgccggctacacctgggaccgctccttcctgttcgaggacggcgccgtgtgcatctgcaacgccgacatcaccgtgagcgtggaggagaactgcatgtaccacgagtccaagttctacggcgtgaacttccccgccgacggccccgtgatgaagaagatgaccgacaactgggagccctcctgcgagaagatcatccccgtgcccaagcagggcatcttgaagggcgacgtgagcatgtacctgctgctgaaggacggtggccgcttgcgctgccagttcgacaccgtgtacaaggccaagtccgtgccccgcaagatgcccgactggcacttcatccagcacaagctgacccgcgaggaccgcagcgacgccaagaaccagaagtggcacctgaccgagcacgccatcgcctccggctccgccttgccctccggactcagatctcgatagggtaccaatggccagttaacagatccagctgctgctgttctagggttcacaagtctgcctatttgtcttccccaatggagctatggttgtctggtctggtccttggtcgtgtcccgtttcattgtgtactatttacctgtaatgtgtatccttaagtctggtttgatggtgtctgaaacgttttgctgtggtagagcagcatggaagaactataatgaataagtgatccctaatcattgtgtccaaattttgcttctgctatacccttttgtgctgtttcttatgttttgcttaaaaatttgatctgacaaacaaatttgtctaaattatgctcttgttctgactgtgtactgtacacatttgtattgctaccggtttggcacatagttttctctttgattgcagatcaaacccttctgattgcagattgcttggctatggctgatgtgctcactgttcttctttagcttgtatattgctgatggtggcttggctacggctgaaaaagttgctgctgcgccgacttggcaactgttgctccagtaatgctttgtcctctcttcctagccgccgacttggcacttggcagctgttgctcctgtaatgcgttgttatctcttatctcttgagatgtactatgattttgaggctgtttgacttgtgccagattgccagtgctgatgctatattatctcaggtttttatgctagtatatgttttactgtgtgctgcctgtgtcgagttacgtaatctattgaaccgctatgcgtgttgatgccctgttgttgcttgccagattgatgcccctgttgcttgcagcttgcaagctgtagtgaaatcctaaaattcgaaaccaaatctattctgaacttttgaagatctgtgatgtccggaagaaaagattcaaacagataaacgggactctccagaatctataaaataaatgatcgacaaacgctttgctttggtaggcttcctagttagttagcggaccgaagcttcggtccgggcctagaaggccagcttcggccgcccctcggtaccctgggatcttccgacggcgtcttcaccgccccgccgccgcccgagccggacttgtcgctgccgccgccgctgctcatcttgcgcgcttgtgtccctccctcagtccctgcgttcgcggatcgcgggcgggtgcgacccgtttggactccggccggtagccttcgtgccgacctcgctcggtccaccggtttgtcggggacccacatgtcagtgaaggtacgcgtccacgtccacagaccctactaccccagacgagtccaaatcgctgttccctcacactctcgtgtaccagcgcgcggcggaaagcacctttccaacaaccgccgacacgtcggtcccacgtcggcatgctccaccggtcagtgtttggcgtgtacggctcccggcgacgaacgagtgtggcctaagctttcctactcccatcccatctgagccacacatctctctcacgccacgcgcacaaaacagccaggctcccacgcgcatcaaccggctctccctttccgtgccactcgcccccaagccccaaaccctcgccgccgcctccgagacagccgccgccacctaggccatggccaccgccgccgccgcgtctaccgcgctcactggcgccactaccgctgcgcccaaggcgaggcgccgggcgcacctcctggccacccgccgcgccctcgccgcgcccatcaggtgctcagcggcgtcacccgccatgccgatggctcccccggccaccccgctccggccgtggggccccaccgagccccgcaagggtgctgacatcctcgtcgagtccctcgagcgctgcggcgtccgcgacgtcttcgcctaccccggcggcgcgtcgatggagatccaccaggcactcacccgctcccccgtcatcgccaaccacctcttccgccacgagcaaggggaggcctttgccgcctccggctacgcgcgctcctcgggccgcgtcggcgtctgcatcgccacctccggccccggcgccaccaacctagtctccgcgctcgccgacgcgctgctcgattccgtcccgatggtcgccatcacgggacaggtggcgcgacgcatgattggcaccgacgccttccaggagacgcccatcgtcgaggtcacgcgctccatcaccaagcacaactacctggtcctcgacgtcgacgacatcccccgcgtcgtgcaggaggctttcttcctcgcctcctctggtcgaccagggccggtgcttgtcgacatccccaaggacatccagcagcagatggcggtgcctgtctgggacaagcccatgagtctgcctgggtacattgcgcgccttcccaagccccctgcgactgagttgcttgagcaggtgctgcgtcttgttggtgaatcgcggcgccctgttctttatgtgggcggtggctgcgcagcatctggtgaggagttgcgacgctttgtggagctgactggaatcccggtcacaactactcttatgggcctcggcaacttccccagcgacgacccactgtctctgcgcatgctaggtatgcatgggacggtgtatgcaaattatgcagtggataaggccgatctgttgcttgcacttggtgtgcggtttgatgatcgcgtgacagggaagattgaggcttttgcaagcagggctaagattgtgcacgttgatattgatccggctgagattggcaagaacaagcagccacatgtgtccatctgtgcagatgttaagcttgctttgcagggcatgaatgctcttcttgaaggaagcacatcaaagaagagctttgactttggctcatggaacgatgagttggatcagcagaagagggaattcccccttgggtataaaacatctaatgaggagatccagccacaatatgctattcaggttcttgatgagctgacgaaaggcgaggccatcatcggcacaggtgttgggcagcaccagatgtgggcggcacagtactacacttacaagcggccaaggcagtggttgtcttcagctggtcttggggctatgggatttggtttgccggctgctgctggtgcttctgtggcaaacccaggtgtcactgttgttgacatcgatggagatggtagctttctcatgaacgttcaggagctagctatgatccgaattgagaacctcccagtgaaggtctttgtgctaaacaaccagcacctggggatggtggtgcagttggaggacaggttctataaggccaacagagcgcacacatacttgggaaacccagagaatgaaagtgagatatatccagatttcgtgacgatcgccaaagggttcaacattccagccgtccgtgtgacaaagaagaacgaagtccgcgcagcgataaagaagatgctcgagactccagggccgtacctcttggatataatcgtcccacaccaggagcatgtgttgcctatgatccctagtggtggggctttcaaggatatgatcctggatggtgatggcaggactgtgtactgacttcgaataggtacccggggatcctctagtgccgtgggtcgtttaagctgccgctgtacctgtgtcgtctggtgccttctggtgtacctgggaggttgtcgtctatcaagtatctgtggttggtgtcatgagtcagtgagtcccaatactgttcgtgtcctgtgtgcattatacccaaaactgttatgggcaaatcatgaataagcttgatgttcgaacttaaaagtctctgctcaatatggtattatggttgtttttgttcgtctcctaatatttgcctgggatcaaattttattggctggtgttcatttgacctccatgttcttgctaggctccattttttactctacagccataatatgtttgattgtttggtttgttctttgttgtacacctggttctgtcgagcttagttttcgacactggcttacagcttaacatgttgctattttattgggttctgattgctattttattgggttctgattgctagtttttgctgaatccaaaaaccatgttatttatttaagcgatccaggttattattatgatggtggctaagtttttttttttccaagggtaaattttctggattctccagtgtttctgtgccgaattcaatcactagagtcgacctgcaaagcttcggtccgggcctagaaggcccgcgccacttacgcttgattccgatgacttcgtaggttcctagctcaagccgctcgtgtccaagcgtcacttacgattagctaatgattacggcatctaggaccgactagttcttatgtgcttctagtctccaaatgtggttgatagttattttgctctaagatcaacagtaatgaagtataaatcatcgttgtggtgtgctactcggttaattgagcattaacacacacaaacatgacgaggatggtataatctccaaaaatgtgtactttgttaggtgggaccctatagccttgattaatgtgctatgttaggcatgcctggaaacgtgtgacgcatatgttttgtgaacctgttgatattatatgtgcttttatattaccatattttattaaaatactaatatttattactagtaagatataacattctatctagcttaaaaactaaccataaatattccataataactagatttaccaaactaatatactaaatatacataataaatacaaaattaacaagacaataatcaatatttatgagcttaatatatttagacattatggttggtcgacgataatcatgctaacttttcgtaattgcttgattgaaatatgcttagaataatgcctctttgttctacatggcaaatagggaccattatggtgtaacaccctgggaaccacaaacaccccgaaatgctactaaactacacaactaaccttcatatataaaatttcgacagcatctcctttgaaaatttgcatagacgtggaagcaacagagtataaacagatctgcgtttaaacgtgcaagcgctactagacaattcagtacattaaaaacgtccgcaatgtgttattaagttgtctaagcgtcaatttgtttacaccacaatatatcctgcca

SEQ ID NO: 276 - DNA, 25638 bp, Artificial Sequence
  PHP100159
gtttacccgccaatatatcctgtcaaacactgcggccgcacttgaccgcggatggagccggagctgtggtgaggccatcgacgggaggtgggggagaacacagtctcagtgttctttgtgagtccgcaaggtttttagcttttctgtattaattaaggttgctgttggctgtagaatacggtcgtggaagagctgtatcggtagctactacgtaagctattatatactggaagtctggagctcgtcgatctccggtcgtcttcctccatttctcctcgtcttgctttgactgctgctaccatttgcttctgttttctgatgaagcatgccatgtcggccaccagtgtttgtgtggtttttgcagggaatggctttcaagtgctgtgattgaatggccctcgtcgtcctcggctgagctcacatggacgcgtcatgtgagtgagatatatgatcatatgatgagtggggttcgggtgagtgcgtacttgaagtaggatcccgctttcactcattcattcattggcctttaaaccgggaaattttcgcgaggagatggagggaagcaagcagggtgacgagtgcagagtgccgcgagcgctttgtcaaaaggcaccgccgtaggcaaaaaaatcaatggccctgactgactcgatggtagtactactgtagagactagagagggttgctccccatatcttcgtgtgacttttactccagcattgcatttccgtcattgagacgttaattaatagcagctttcgggacagatgactgtggccatgtttcgtcacggccgcttcgtgccagctgggggtactatagtactgtgattttgttagtaaaaactttcattaggccaccattgacgaccgggccttcgcttttgctgcgctaattaaccatttcccggcgaccgaagggaacatgaacatgccccgacacatgagggcatgaggactagtgttctccctgtcgttcgttgacttgactagtgatagtttaaacgctcttcaactggaagagcggttactaccggttcactagctagctgctaatcgagctagttaccctatgaggtgacatgaagcgctcacggttactatgacggttagcttcacgactgttggtggcagtagcgtacgacttagctatagttccggacttacccttaagataacttcgtatagcatacattatacgaagttatgggcccacgcgtgaagagcggttaccagagctggtcacctttgtccaccaagatggaactgtcttcggccagaatggccatctggattcagcaggcctagaaggccatttatcgctatcaactttgtatagaaaagttgggccgagctcggtacggccagaatggcccggaccgggttaccaagcggccgcacactgatagtttaaactgaaggcgggaaacgacaatctgatcatgagcggagaattaagggagtcacgttatgacccccgccgatgacgcgggacaagccgttttacgtttggaactgacagaaccgcaacgattgaaggagccactcagccgcgggtttctggagtttaatgagctaagcacatacgtcagaaaccattattgcgcgttcaaaagtcgcctaaggtcactatcagctagcaaatatttcttgtcaaaaatgctccactgacgttccataaattcccctcggtatccaattagagtctcatattcactcccatggcggccaatgcgggcggcggtggagcgggaggaggcagcggcagcggcagcgtggctgcgccggcggtgtgccgccccagcggctcgcggtggacgccgacgccggagcagatcaggatgctgaaggagctctactacggctgcggcatccggtcgcccagctcggagcagatccagcgcatcaccgccatgctgcggcagcacggcaagatcgagggcaagaacgtcttctactggttccagaaccacaaggcccgcgagcgccagaagcgccgcctcaccagcctcgacgtcaacgtgcccgccgccggcgcggccgacgccaccaccagccaactcggcgtcctctcgctgtcgtcgccgccgccttcaggcgcggcgcctccctcgcccaccctcggcttctacgccgccggcaatggcggcggatcggctgtgctgctggacacgagttccgactggggcagcagcggcgctgctatggccaccgagacatgcttcctgcaggactacatgggcgtgacggacacgggcagctcgtcgcagtggccacgcttctcgtcgtcggacacgataatggcggcggccgcggcgcgggcggcgacgacgcgggcgcccgagacgctccctctcttcccgacctgcggcgacgacggcggcagcggtagcagcagctacttgccgttctggggtgccgcgtccacaactgccggcgccacttcttccgttgcgatccaacagcaacaccagctgcaggagcagtacagcttttacagcaacagcaacagcacccagctggccggcaccggcaaccaagacgtatcggcaacagcagcagcagccgccgccctggagctgagcctcagctcatggtgctccccttaccctgctgcagggagtatgtgagagcaacgcgagctgccactgctcttcactgatgtctctggaatggaaggaggaggaagtgagaacagatcattcgacaaagcagcattagtccgttgatcggtggaagaccactcgtcagtgttgagttgaatgtttgatcaataaaatacggcaatgctgtaagggttgttttttatgccattgataatacactgtactgttcagttgttgaactctatttcttagccatgccaagtgcttttcttattttgaataacattacagcaaaaagttgaaagacaaaaaaaaaaacccccgaacagagtgctttgggtcccaagcttctttagactgtgttcggcgttccccctaaatttctccccctatatctcactcacttgtcacatcagcgttctctttccccctatatctccacgctctacagcagttccacctatatcaaacctctataccccaccacaacaatattatatactttcatcttcaactaactcatgtaccttccaatttttttctactaataattatttacgtgcacagaaacttagcaaggagagagagagcgggaatttaaatgctcggcgttaggcttttagtccgctaggtggctagaccgaggttaggacgctagttcactaggggcctagtggtgttttaagacgtcacggtcaccacgcgtggaccgaagcttgcatgcctgcatcactgactagctaaacagcggccgcatcgagcagctggcttgtggggaccagacaaaaaaggaatggtgcagaattgttaggcgcacctaccaaaagcatctttgcctttattgcaaagataaagcagattcctctagtacaagtggggaacaaaataacgtggaaaagagctgtcctgacagcccactcactaatgcgtatgacgaacgcagtgacgaccacaaaactcgagcaacgagatcatgagccaatcaaagaggagtgatgtagacctaaagcaataatggagccatgacgtaagggcttacgcccatacgaaataattaaaggctgatgtgacctgtcggtctctcagaacctttactttttatgtttggcgtgtatttttaaatttccacggcaatgacgatgtgaccgtcgacccactaaaacattgctttgtcaaaagctaaaaaagatgatgcccgacagccacttgtgtgaagcatgagaagccggtccctccactaagaaaattagtgaagcatcttccagtggtccctccactcacagctcaatcagtgagcaacaggacgaaggaaatgacgtaagccatgacgtctaatcccagggcccggtgaccaatcgaattagcttggcgcgtggaccgaagcttgcatgcctgcagtgcagcgtgacccggtcgtgcccctctctagagataatgagcattgcatgtctaagttataaaaaattaccacatattttttttgtcacacttgtttgaagtgcagtttatctatctttatacatatatttaaactttactctacgaataatataatctatagtactacaataatatcagtgttttagagaatcatataaatgaacagttagacatggtctaaaggacaattgagtattttgacaacaggactctacagttttatctttttagtgtgcatgtgttctcctttttttttgcaaatagcttcacctatataatacttcatccattttattagtacatccatttagggtttagggttaatggtttttatagactaatttttttagtacatctattttattctattttagcctctaaattaagaaaactaaaactctattttagtttttttatttaataatttagatataaaatagaataaaataaagtgactaaaaattaaacaaataccctttaagaaattaaaaaaactaaggaaacatttttcttgtttcgagtagataatgccagcctgttaaacgccgtcgacgagtctaacggacaccaaccagcgaaccagcagcgtcgcgtcgggccaagcgaagcagacggcacggcatctctgtcgctgcctctggacccctctcgagagttccgctccaccgttggacttgctccgctgtcggcatccagaaattgcgtggcggagcggcagacgtgagccggcacggcaggcggcctcctcctcctctcacggcaccggcagctacgggggattcctttcccaccgctccttcgctttcccttcctcgcccgccgtaataaatagacaccccctccacaccctctttccccaacctcgtgttgttcggagcgcacacacacacaaccagatctcccccaaatccacccgtcggcacctccgcttcaaggtacgccgctcgtcctcccccccccccctctctaccttctctagatcggcgttccggtccatgcatggttagggcccggtagttctacttctgttcatgtttgtgttagatccgtgtttgtgttagatccgtgctgctagcgttcgtacacggatgcgacctgtacgtcagacacgttctgattgctaacttgccagtgtttctctttggggaatcctgggatggctctagccgttccgcagacgggatcgatttcatgattttttttgtttcgttgcatagggtttggtttgcccttttcctttatttcaatatatgccgtgcacttgtttgtcgggtcatcttttcatgcttttttttgtcttggttgtgatgatgtggtctggttgggcggtcgttctagatcggagtagaattctgtttcaaactacctggtggatttattaattttggatctgtatgtgtgtgccatacatattcatagttacgaattgaagatgatggatggaaatatcgatctaggataggtatacatgttgatgcgggttttactgatgcatatacagagatgctttttgttcgcttggttgtgatgatgtggtgtggttgggcggtcgttcattcgttctagatcggagtagaatactgtttcaaactacctggtgtatttattaattttggaactgtatgtgtgtgtcatacatcttcatagttacgagtttaagatggatggaaatatcgatctaggataggtatacatgttgatgtgggttttactgatgcatatacatgatggcatatgcagcatctattcatatgctctaaccttgagtacctatctattataataaacaagtatgttttataattattttgatcttgatatacttggatgatggcatatgcagcagctatatgtggatttttttagcactgccttcatacgctatttatttgcttggtactgtttcttttgtcgatgctcaccctgttgtttggtgttacttctgcaggtcgactttaacttagcctaggatccatggccactgtgaacaactggctcgctttctccctctccccgcaggagctgccgccctcccagacgacggactccacactcatctcggccgccaccgccgaccatgtctccggcgatgtctgcttcaacatcccccaagattggagcatgaggggatcagagctttcggcgctcgtcgcggagccgaagctggaggacttcctcggcggcatctccttctccgagcagcatcacaaggccaactgcaacatgatacccagcactagcagcacagtttgctacgcgagctcaggtgctagcaccggctaccatcaccagctgtaccaccagcccaccagctcagcgctccacttcgcggactccgtaatggtggcttcctcggccggtgtccacgacggcggtgccatgctcagcgcggccgccgctaacggtgtcgctggcgctgccagtgccaacggcggcggcatcgggctgtccatgattaagaactggctgcggagccaaccggcgcccatgcagccgagggtggcggcggctgagggcgcgcaggggctctctttgtccatgaacatggcggggacgacccaaggcgctgctggcatgccacttctcgctggagagcgcgcacgggcgcccgagagtgtatcgacgtcagcacagggtggagccgtcgtcgtcacggcgccgaaggaggatagcggtggcagcggtgttgccggcgctctagtagccgtgagcacggacacgggtggcagcggcggcgcgtcggctgacaacacggcaaggaagacggtggacacgttcgggcagcgcacgtcgatttaccgtggcgtgacaaggcatagatggactgggagatatgaggcacatctttgggataacagttgcagaagggaagggcaaactcgtaagggtcgtcaagtctatttaggtggctatgataaagaggagaaagctgctagggcttatgatcttgctgctctgaagtactggggtgccacaacaacaacaaattttccagtgagtaactacgaaaaggagctcgaggacatgaagcacatgacaaggcaggagtttgtagcgtctctgagaaggaagagcagtggtttctccagaggtgcatccatttacaggggagtgactaggcatcaccaacatggaagatggcaagcacggattggacgagttgcagggaacaaggatctttacttgggcaccttcagcacccaggaggaggcagcggaggcgtacgacatcgcggcgatcaagttccgcggcctcaacgccgtcaccaacttcgacatgagccgctacgacgtgaagagcatcctggacagcagcgccctccccatcggcagcgccgccaagcgcctcaaggaggccgaggccgcagcgtccgcgcagcaccaccacgccggcgtggtgagctacgacgtcggccgcatcgcctcgcagctcggcgacggcggagccctggcggcggcgtacggcgcgcactaccacggcgccgcctggccgaccatcgcgttccagccgggcgccgccagcacaggcctgtaccacccgtacgcgcagcagccaatgcgcggcggcgggtggtgcaagcaggagcaggaccacgcggtgatcgcggccgcgcacagcctgcaggacctccaccacctgaacctgggcgcggccggcgcgcacgactttttctcggcagggcagcaggccgccgccgctgcgatgcacggcctgggtagcatcgacagtgcgtcgctcgagcacagcaccggctccaactccgtcgtctacaacggcggggtcggcgacagcaacggcgccagcgccgtcggcggcagtggcggtggctacatgatgccgatgagcgctgccggagcaaccactacatcggcaatggtgagccacgagcaggtgcatgcacgggcctacgacgaagccaagcaggctgctcagatggggtacgagagctacctggtgaacgcggagaacaatggtggcggaaggatgtctgcatgggggactgtcgtgtctgcagccgcggcggcagcagcaagcagcaacgacaacatggccgccgacgtcgggcatggcggcgcgcagctcttcagtgtctggaacgacacttaagcgtacctagtggtacctgacatcttatagtctgcaacctctcgtgtctgaattcctatctttatcaagtgttattgcttccacgactataggacagctttcgtcgaaagcttttgctcatgtgatctcgaaggattcatctagtctgatttttcgtgacttgtatcggttttattggattcatccaacatatatcaataaaaaatgagttgtgtttcctttcttcctagttcagttaaaattatttccctcctgcgcttgtgctgtaattgtctgtgtacctgttgtttgtgactgtgttagttcccttggatatgatttcgtatttgatatgtacatggagatagcttagcttcattattggagtatgaagttagtatgacatagtcactctcctggaaaattgacactgcaaaccatatttttattctgaaccacaaatcctagtcagtccgctggcatatgccgtccgtttgctgaatccagaacgtgggtttggagatgtacggctgagatgcctctatgcgaaggggatttcgtggtgaaacgagatgggagtagagcaacgcccgtggaagatgcttcaaacttccacacttttgagcaacgatcggcagtagtaaggtagacgatttcaagatcaaagcatatgaagataaacaacatcaacaacaaaatttgttggggttctatagagagaaacagagctacatacatacactgttttgtatctaccatctgagatgatgaaaagatgaaaaactaaagaatgccccggcgccaacgccaggacacgccgcgcgcgcgtcacccgagccatctcttgacccagccggcgctgtatatttacacacgttgcagcatcgatcaccacctgttcgatcgcgtcgccgtcaccggcgcgccgcgacttattgaactagtctagggcgcggctaacaacctagcttagattgccttgtctaaacccttaggctaacgcgccacggtaacccggtccgggcctagaaggccccagagctggtcaccccatacgattggaagcttcaagtttgtacaaaaaagcaggctccggccagagttacccggaccgaagcttgcatgcctgcagtgcagcgtgacccggtcgtgcccctctctagagataatgagcattgcatgtctaagttataaaaaattaccacatattttttttgtcacacttgtttgaagtgcagtttatctatctttatacatatatttaaactttactctacgaataatataatctatagtactacaataatatcagtgttttagagaatcatataaatgaacagttagacatggtctaaaggacaattgagtattttgacaacaggactctacagttttatctttttagtgtgcatgtgttctcctttttttttgcaaatagcttcacctatataatacttcatccattttattagtacatccatttagggtttagggttaatggtttttatagactaatttttttagtacatctattttattctattttagcctctaaattaagaaaactaaaactctattttagtttttttatttaataatttagatataaaatagaataaaataaagtgactaaaaattaaacaaataccctttaagaaattaaaaaaactaaggaaacatttttcttgtttcgagtagataatgccagcctgttaaacgccgtcgacgagtctaacggacaccaaccagcgaaccagcagcgtcgcgtcgggccaagcgaagcagacggcacggcatctctgtcgctgcctctggacccctctcgagagttccgctccaccgttggacttgctccgctgtcggcatccagaaattgcgtggcggagcggcagacgtgagccggcacggcaggcggcctcctcctcctctcacggcaccggcagctacgggggattcctttcccaccgctccttcgctttcccttcctcgcccgccgtaataaatagacaccccctccacaccctctttccccaacctcgtgttgttcggagcgcacacacacacaaccagatctcccccaaatccacccgtcggcacctccgcttcaaggtacgccgctcgtcctcccccccccccctctctaccttctctagatcggcgttccggtccatgcatggttagggcccggtagttctacttctgttcatgtttgtgttagatccgtgtttgtgttagatccgtgctgctagcgttcgtacacggatgcgacctgtacgtcagacacgttctgattgctaacttgccagtgtttctctttggggaatcctgggatggctctagccgttccgcagacgggatcgatttcatgattttttttgtttcgttgcatagggtttggtttgcccttttcctttatttcaatatatgccgtgcacttgtttgtcgggtcatcttttcatgcttttttttgtcttggttgtgatgatgtggtctggttgggcggtcgttctagatcggagtagaattctgtttcaaactacctggtggatttattaattttggatctgtatgtgtgtgccatacatattcatagttacgaattgaagatgatggatggaaatatcgatctaggataggtatacatgttgatgcgggttttactgatgcatatacagagatgctttttgttcgcttggttgtgatgatgtggtgtggttgggcggtcgttcattcgttctagatcggagtagaatactgtttcaaactacctggtgtatttattaattttggaactgtatgtgtgtgtcatacatcttcatagttacgagtttaagatggatggaaatatcgatctaggataggtatacatgttgatgtgggttttactgatgcatatacatgatggcatatgcagcatctattcatatgctctaaccttgagtacctatctattataataaacaagtatgttttataattattttgatcttgatatacttggatgatggcatatgcagcagctatatgtggatttttttagccctgccttcatacgctatttatttgcttggtactgtttcttttgtcgatgctcaccctgttgtttggtgttacttctgcaggtcgactttaacttagcctaggatccatggcgcccagcagctacgaggtggcggcttccatcctcctctgcgccgaggacagcagcagcatcctggacctcgaagcggaggccgaggaggaagcgctactggcgcggagcggggagcccggcggcggcgcggagttccccgtgccgtccgaggaatgcgtcgccggtttcctggagtctgaggcagcgcacatgccgcgggaggactacgccgagaggctgcgcagcggggggatggatctccgcgtccggacggacgccatcgactggatttggaaggttcacacgtgctacggtttcggccctctcactgcctgcttggccgtcaactacctggaccgcttcctctcgctctaccagcttccggaaggcaaggcttggatgacacagctgctgtccgtggcgtgcttgtccctggccgccaagatggaggagacctacgtcccttcgtccctggacctgcaggccggggacgcgcggtacgtgttcgaggcgaagacgatccagaggatggagctcctggtcctcagcacgctcaagtggaggatgcaagcggtcacccccttgtcgtacgtcgactacttcctccaccggctccgaggcggcgccgcgccgagcagacgcgccgtcctccgatccgcggagctcatcctgtgcatcgccagagggacgcactgcttggatttcaggccctcggagatcgccttggccgtcgccgccaccgtggccggcgaagagcgcgccgtggacatcgacagggccttcacccaccgtgtacataaggagagggtgtcgcgatgcctcgaagcgatccagcaggccaccgccaccatggccctgccgcagccgctgaaaagtgaaggcccgagcagcagcggccgcagggcctcgtcttcctcggccaccgtgccgcggagccccaccggggtgctggacgctggctgcctgagctacaggagagccgccgccgccgccgcctcgcacgcgagctccagctggcgcgacgaggacgacgacgactgccccccggctgtctgcagcaagaggaggaagattagcagatgaggtaccgttaacagatctactaactatctatactgtaataatgttgtatagccgccggatagctagctagtttagtcattcagcggcgatgggtaataataaagtgtcatccatccatcaccatgcgtggcaacgtgagcaatgacctgattgaacaaattgaaatgaaaagaagaaatatgttatatgtcaacgagatttcctcataatgccactgacgacgtgtgtccaagaaatgtatcagtgatacgtatattcacaatttttttatgacttatactcacaatttgtttttttactacttatactcacaatttgttgtgcgtaccataacaatttcgatcgaatatatatcagaaagttgacgaaagtaagctcactcaaaaagttaaatgggctgcggaagctgcgtcaggcccaagttttggctattctatccggtatccacgattttgatggctgagggacatatgttcgcttaagcttcggtccgggcctagaaggccgatctcccgggcacccagctttcttgtacaaagtggccgttaacggatcggccagaatggcccggaccgggttaccccgcggttcaaagccaatgactgttgttaggtccagtttctaaggacgaatcatccaatcactggttctttctgaacaaaacaaagagctatagagttacgttactgtagccgagacagagcctgcaatctggttatgccacatactaggttctttcttaaagttgactcactctatcctaagttctacttacaaggagctacaacaaattggtcataaccggagagcgttcaaggaggtaatatcccatcttactctgtagcaaggctacaaaaggagagctaaagaactaggctacaaaaagagagctaaagaactaactatctagcaagactacagagctatagtgtagagatttcataaccggtgagcgttcaaggatactttgaagagaagaggtaatatctcaactagcaagactacaaaaaaatggagatataaaactaactgtctaacaagactacagagctatagtagagatagatacgttcgacacttaagcatgagaattcgagctcggtaccctggttcacaaactcaatacaacacacagtggagtagggtattacgctccggcggcccgaaccactctaaatccttgtgtcctcgtgtgctcttccaccattaatgactgtaattgcagggacacgaagagttgtagcgcttttgccaacaagatccgctatatgctagtagagtggaacctgcacagcaacaagcatccaataatctgagaataagaattatgtgtggtgatggttctcatctctgcaactcgccattttcgcgagagaaccaaatccaagttggtgaagatcatgatttgggctcatgggctggcatagtagctattacctttgcaattgtggttcgaatctatccgatattctccttttcagggagagctaatgcttatgcttattgggtattttggtttgacactgcttcacgcccaaaaaaaggcaactatgtctgagttggatatggcccaaaaaaaggcagctatgtctgagttggatatggaagtcttctttcgtttagggtgaagtaagaccaagctcatgagcttattatcttaggtcggaacaaattagttgataggcatggcacatttatcaaattataatgattttaacagaaaagcaacacctctttttcagcagcaccagctttgcaagctgcaattgacactccaagcatagtatttgctccaaactcagcctgcatttcgcacaatatcatatctatttccatttggataaaatatattttccagaaatatgggaacagaatcaagatacagaaaaaagttgtggtagtagtggtaagtggaaacacaagtacagtgaaaagatagcattatttctgaacagtcaaattaaccgaaataagtagtatcacatactgcccctaaattgactacacccaatgtaaagaattgcttgagcatattgagccatcagttgtttgtttgtgtaacggatttgacaatgcagagttcaggagcaaaaaaccgcaaaggagagaaagagggaaaggatctcctagtatcccaccttgtggcgcgccctgtcaagtgcatgatggcctggtcgatctgcgtctgctgctgcggttccatcccaacgagtgcctccgacaccttgtcgttgatcacccgcaccgcgtaggcgacccccctggcgaggaacttccgcctctcggaggccccggccgcgtcggcggcggcgccctcgagcgcgcccacgctagccgtagatgctcggtgcacggccttgttggtgtgcaactcgacctcaacggccggtgcgctacgcccgtcaaggatctggcgcgcccgcaccctcgtgatcacggtgggcgcctcccgcctcatgtggccgacgatgaaaagcgccgggttaggggccttggcgcgcaccgccgtattcagggcctcctcgctcttgcgcgagagcaggtgcttccccaggtactcctgcactgacaaggctgccacagcggtggaatttgtcctcacgacttcgccacgtcgtcctcacctccctggcttcccacgactccgccgtatcgaggtgctcggtgggtcgtcttaatccgaagtccgaactaggaagacgagacagagaggtctgaggaatgggcctcgtttgatgttgagctgaattatttttccagcataagcccaggtcttggtccatgaacaaaattactagaaacccagcccagtactacgatctaaaagagggactgccactggatagctctctctagcattctccacgctccaatacagcggcgtcgtgtctatccgggtctatccgcgaacacgtgagaactctccagaaactgctttctcctccacttcatctctctcgctttccctctataaaaagaccccttctaggaattgagggagacagcaagcaccaagcagcgatccgaagctcaatcaattcactcaaacctcttccccaaatcttcgattagatcttcgttgacaagaagactagaaccgaacctgacatgtccaacctgctcacggttcaccagaaccttccggctcttccagtggacgcgacgtccgatgaagtcaggaagaacctcatggacatgttccgcgacaggcaagcgttcagcgagcacacctggaagatgctgctctccgtctgccgctcctgggctgcatggtgcaagctgaacaacaggaagtggttccccgctgagcccgaggacgtgagggattaccttctgtacctgcaagcgcgaggtttgtttctgcttctacctttgatatatatataataattatcattaattagtagtaatataatatttcaaatatttttttcaaaataaaagaatgtagtatatagcaattgcttttctgtagtttataagtgtgtatattttaatttataacttttctaatatatgaccaaaacatggtgatgcctaggtctggcagtgaagaccatccagcaacaccttggacaactgaacatgcttcacaggcgctccggcctcccgcgccccagcgactcgaacgccgtgagcctcgtcatgcgccgcatcaggaaggaaaacgtcgatgccggcgaaagggcaaagcaggccctcgcgttcgagaggaccgatttcgaccaggtccgcagcctgatggagaacagcgacaggtgccaggacattaggaacctggcgttcctcggaattgcatacaacacgctcctcaggatcgcggaaattgcccgcattcgcgtgaaggacattagccgcaccgacggcggcaggatgcttatccacattggcaggaccaagacgctcgtttccaccgcaggcgtcgaaaaggccctcagcctcggagtgaccaagctcgtcgaacgctggatctccgtgtccggcgtcgcggacgacccaaacaactacctcttctgccgcgtccgcaagaacggggtggctgcccctagcgccaccagccaactcagcacgagggccttggaaggtattttcgaggccacccaccgcctgatctacggcgcgaaggatgacagcggtcaacgctacctcgcatggtccgggcactccgcccgcgttggagctgctagggacatggcccgcgccggtgtttccatccccgaaatcatgcaggcgggtggatggacgaacgtgaacattgtcatgaactacattcgcaaccttgacagcgagacgggcgcaatggttcgcctcctggaagatggtgactgaggtacccaacctagacttgtccatcttctggattggccaacttaattaatgtatgaaataaaaggatgcacacatagtgacatgctaatcactataatgtgggcatcaaagttgtgtgttatgtgtaattactagttatctgaataaaagagaaagagatcatccatatttcttatcctaaatgaatgtcacgtgtctttataattctttgatgaaccagatgcatttcattaaccaaatccatatacatataaatattaatcatatataattaatatcaattgggttagcaaaacaaatctagtctaggtgtgttttgcgatccgatatcgaattggccacggtaccagctgctgctgttctagggttcacaagtctgcctatttgtcttccccaatggagctatggttgtctggtctggtccttggtcgtgtcccgtttcattgtgtactatttacctgtaatgtgtatccttaagtctggtttgatggtgtctgaaacgttttgctgtggtagagcagcatggaagaactataatgaataagtgatccctaatcattgtgtccaaattttgcttctgctatacccttttgtgctgtttcttatgttttgcttaaaaatttgatctgacaaacaaatttgtctaaattatgctcttgttctgactgtgtactgtacacatttgtattgctaccggtttggcacatagttttctctttgattgcagatcaaacccttctgattgcagattgcttggctatggctgatgtgctcactgttcttctttagcttgtatattgctgatggtggcttggctacggctgaaaaagttgctgctgcgccgacttggcaactgttgctccagtaatgctttgtcctctcttcctagccgccgacttggcacttggcagctgttgctcctgtaatgcgttgttatctcttatctcttgagatgtactatgattttgaggctgtttgacttgtgccagattgccagtgctgatgctatattatctcaggtttttatgctagtatatgttttactgtgtgctgcctgtgtcgagttacgtaatctattgaaccgctatgcgtgttgatgccctgttgttgcttgccagattgatgcccctgttgcttgcagcttgcaagctgtagtgaaatcctaaaattccaaaccaaatctattctgaacttttgaagatctgtgatgtccggaagaaaagattcaaacagataaacgggactctccagaatctataaaataaatgatcgacaaacgctttgctttggtaggcttcaagcttggtcacccggtccgggcctagaaggccagcttcggccgccccgggcaactttattatacaaagttgatagataaatcagatatctggttcctaaggacccggcggaccgattaaactgattcggtccgacgcgttacctaataacttcgtatagcatacattatacgaagttattagctaactaactagtaagcttaagccatgggtcgacggatccgttaactagcgtggcatttggcaccgccgcacactatgcgagctaggagtgctagtttacagatgaaactatgaaaccaagaaaacacaattgtccgtagctagcgcgtggcgtcgtgtcaagcttcacacagtatcttcgttcttcactataaatcgcgcctgttgttcgtgagacccaccaccgtggataacagtcccctaataataagcgatcaacagcactgctgatggctgaacaccgaggcgccgccgcgcgtaaccatccgccggagcagcccgtcgtgccggcgaacgacgccttccccgaccgcgcccagcagctctgcctcgacgccgggcgcgcgctcgcgatgtgcggcgtgctcgtcgccgtccctcccgcattttacgcgtcgacgtcgcggacgacaccgcacttgccttcgtcggcttcgtcctctggatcatcggtgcgtggctgtgcctcctggcgctcacgcccttggctccacgggcggtgagggcgggcggggccgccgccagcaccttgctgatcaggtgcctgtccctttcatgaactactagcgcccgcgcccgcggccgccgggcacaagagaacacatcgatgttcgctgcgtacgtcagcaataaggcactctttgtcagtagtcgagtgcatatgttgggtgtttgccctgggagatttcaagtgttgtggccattatcccgcaggataaaaaatcggcggcttttggattgatacggaaaataacgatgtttcatgctcgtgttgtgtgtgtgacatcttgtcagccaagtttttaaccgttgctactccccctctgtgggctcagtgtgtggaccggaatacgtcgtacataggccgtagcctaagcccaatatgccgtttttcaggttggcctgtgtgacgacaagcgggtctcaaaagcccatcacgcaactggcctgcaattattggaggagagcgcgtcgagttggttccagaggctgcgtggtggggccggactctgcgacgacctctcgttcgcgtccgatttggttgccgtgagccgtgacgtaacgcctccttccgttcctccctatataagttccacccccgggtccggtttccccaagccccagtgacccccgatcccgatcgcgaaatctccgcacccgccggcaagggaccgaagcaagcctctctcccgaccgtcgcatcaaggtacgcgtccgctcgatctgtcctcttccttctcgatttgacttgctgtggtgcccgatcacgggatcagaatcgcaccagtgtagatttcgcatgttctaagatgtgttagtttccaggctaatccagttctcttgacgcccgatccgatcgagctccgtgtttatttcagcctaatcgtagtattcccctaaaatttcctcattagggggttcgcaagattgttggtcgacaggttcacttatgctcgatcgcttacttttagtcgattcatgctgcgtactattgttgccccccgtggttttatcttttctcgtgtgaaatccagtagatatagtagatatcgtagcattaggttttaattcaatcgattgattattgtatcatcaaaattgagaagttcgaatcatgcctatcatgctgcctcaaccgaaatcctgtatattgaagtttcaattcaattgattgatcattcattagattcaaccaaaatctagaaggttagatgacgcatgtcatgctgcctgcgtagtttacctttgatctgtttatgattaccttatcagtaggatatttgtgattttgggaagtagcactaactgattcatgctgacatgatgttccctttcagattatactgttgagtcctatctaattgatgctttgtatgctatatgaatacgtcatggtaaattagcagttaattagcatattagcaattgggcgtacctcatcaggattgctcttgtagatgtgtgtggtgatgtttcttgttcaattcatgttctgctttaaaagtatgtgttctctgtttgttaattaagattcatggttataatgatttggacctaattaatcagggttgcccttttagatgcgtggttacttgttgagttcatttttttcctgctatagttgtatgcgtttgttcattcatggttagatttgatttgtttcttctctattccatgccttccatatacttcaattgtagcttaacatgagatttctgtatatgcaggtcgaccgccggggatccacacgacaccatggcccagtccaagcacggcctgaccaaggagatgaccatgaagtaccgcatggagggctgcgtggacggccacaagttcgtgatcaccggcgagggcatcggctaccccttcaagggcaagcaggccatcaacctgtgcgtggtggagggcggccccttgcccttcgccgaggacatcttgtccgccgccttcatgtacggcaaccgcgtgttcaccgagtacccccaggacatcgtcgactacttcaagaactcctgccccgccggctacacctgggaccgctccttcctgttcgaggacggcgccgtgtgcatctgcaacgccgacatcaccgtgagcgtggaggagaactgcatgtaccacgagtccaagttctacggcgtgaacttccccgccgacggccccgtgatgaagaagatgaccgacaactgggagccctcctgcgagaagatcatccccgtgcccaagcagggcatcttgaagggcgacgtgagcatgtacctgctgctgaaggacggtggccgcttgcgctgccagttcgacaccgtgtacaaggccaagtccgtgccccgcaagatgcccgactggcacttcatccagcacaagctgacccgcgaggaccgcagcgacgccaagaaccagaagtggcacctgaccgagcacgccatcgcctccggctccgccttgccctccggactcagatctcgatagagtcaacctagacttgtccatcttctggattggccaacttaattaatgtatgaaataaaaggatgcacacatagtgacatgctaatcactataatgtgggcatcaaagttgtgtgttatgtgtaattactagttatctgaataaaagagaaagagatcatccatatttcttatcctaaatgaatgtcacgtgtctttataattctttgatgaaccagatgcatttcattaaccaaatccatatacatataaatattaatcatatataattaatatcaattgggttagcaaaacaaatctagtctaggtgtgttttgcgaattgcggcgcccttactttaacgcctctaaccaacacccctttatctttataaggaacaataaacagaatttgccccactgttctaaatcacctaataatatccccagctaaaaacaataaaggtttcctagaattaagacaagcatgactgttcctccaggagggtttggaacattgttgcagtcttgcagatacgggcgaagggtgagaaacagagcggagggctggaggtgacctcggtagtcgacgccggagttgagcttgacaacgacggggcggcccctgatggacttgaggaagtccgatggcgtcttcaccgtcccgccggcgcccgaggcgggcctgtcgctgccgccgccgccgctgctcatcttgcgcgctgtgcccccggcggtgtccctgtgttgcggatcgcgggtgggccaggtggatgcgagggcgacccgtttggactccggccggagccgccggatccctggtcggtgtcagtgccgtttactctgggccccacgtgtcagtaccgtctgtagatgacaacaacccgtcgtccacagtcatgtccaaaatatcctttcttcttttttttcgattcggatatctatcttccttttttttttccaaaaatcttcttgacgcaccagcgcgcacgtttgtggtaaacgccgacacgtcggtcccacgtcgatagaccccacccaccagtgagtagcgtgtacgtattcgggggtgacggacgtgtcgccgtcgtcttgctagtcccattcccatctgagccacacatctctgaacaaaaaaaaggagggaggcctccacgcacatccccctccgtgccacccgccccaaaccctcgcgccgcctccgagacagccgccgcaaccatggccaccgccgccgccgcgtctaccgcgctcactggcgccactaccgctgcgcccaaggcgaggcgccgggcgcacctcctggccacccgccgcgccctcgccgcgcccatcaggtgctcagcggcgtcacccgccatgccgatggctcccccggccaccccgctccggccgtggggccccaccgagccccgcaagggtgctgacatcctcgtcgagtccctcgagcgctgcggcgtccgcgacgtcttcgcctaccccggcggcgcgtccatggagatccaccaggcactcacccgctcccccgtcatcgccaaccacctcttccgccacgagcaaggggaggcctttgccgcctccggctacgcgcgctcctcgggccgcgtcggcgtctgcatcgccacctccggccccggcgccaccaacctagtctccgcgctcgccgacgcgctgctcgattccgtccccatggtcgccatcacgggacaggtggcgcgacgcatgattggcaccgacgccttccaggagacgcccatcgtcgaggtcacccgctccatcaccaagcacaactacctggtcctcgacgtcgacgacatcccccgcgtcgtgcaggaggctttcttcctcgcctcctctggtcgaccagggccggtgcttgtcgacatccccaaggacatccagcagcagatggcggtgcctgtctgggacaagcccatgagtctgcctgggtacattgcgcgccttcccaagccccctgcgactgagttgcttgagcaggtgctgcgtcttgttggtgaatcgcggcgccctgttctttatgtgggcggtggctgcgcagcatctggtgaggagttgcgacgctttgtggagctgactggaatcccggtcacaactactcttatgggcctcggcaacttccccagcgacgacccactgtctctgcgcatgctaggtatgcatgggacggtgtatgcaaattatgcagtggataaggccgatctgttgcttgcacttggtgtgcggtttgatgatcgcgtgacagggaagattgaggcttttgcaagcagggctaagattgtgcacgttgatattgatccggctgagattggcaagaacaagcagccacatgtgtccatctgtgcagatgttaagcttgctttgcagggcatgaatgctcttcttgaaggaagcacatcaaagaagagctttgactttggctcatggaacgatgagttggatcagcagaagagggaattcccccttgggtataaaacatctaatgaggagatccagccacaatatgctattcaggttcttgatgagctgacgaaaggcgaggccatcatcggcacaggtgttgggcagcaccagatgtgggcggcacagtactacacttacaagcggccaaggcagtggttgtcttcagctggtcttggggctatgggatttggtttgccggctgctgctggtgcttctgtggcaaacccaggtgtcactgttgttgacatcgatggagatggtagctttctcatgaacgttcaggagctagctatgatccgaattgagaacctcccagtgaaggtctttgtgctaaacaaccagcacctggggatggtggtgcagttggaggacaggttctataaggccaacagagcgcacacatacttgggaaacccagagaatgaaagtgagatatatccagatttcgtgacgatcgccaaagggttcaacattccagcggtccgtgtgacaaagaagaacgaagtccgcgcagcgataaagaagatgctcgagactccagggccgtacctcttggatataatcgtcccacaccaggagcatgtgttgcctatgatccctagtggtggggctttcaaggatatgatcctggatggtgatggcaggactgtgtactgactagctagtcagttaacagatctgccagatcctcggtgtacaaataacccgtcttatcctatgagacgggccggcgtcagtgtgttctggaggaatttttatgtcagagcctttttctttgtgtgcttgatgtagatgccaagggaagcttattggctgttgaagcttgatgcaaaataaattatggaactctgttttttgtttatctaataataactagcaaatatgcttccattgcattgaaactaacagccttttgtgtttccaagttttattttgtgacaatgtcatctatttcaattagttgtggaatcggaaacttgcaggactaacttggaaactccaatccctcagcatcctggactttttcctggtgtaatccatgtagatattattttaatcatcattttagttctggaggtttttccatctccggttttgctcccctttcttcaaaaaaaaaaaaaaaatgccgtaggcgccgcaacgcccacctgttgttcaaactcatgggcacgagtggctcgaagattttatacaacaattgctgtagtttcaccgttgctggtgaagaagcatttttttaaaaaaatatagtggtattcattttaattagtttagttgtgcagcgagcaaaatttggacatgctctgctcggaatctgatcgacctagacacagattagcagcagtagctttgtcatctgttccaagagttgcgatctgatagaagaaaaaaaaaccttcccttcaatgtaaaaccgaaactaacaagaaagaagcacagtgccgtttaggcaagtatggagtacgtattaagcatgtagaaggccatgcatgaaccactaacaagaaagaagcgcagtgccattcaggcaagcataagcatgtagattggcatgcatgaacaactaacagtagatcgtctctggtctgattagaagttttttgggaagccaagaaatcatgtacaactggttccatctcaaattccgtggcaaaaagaggcctaagcaacatacctcgagtagatcacattcaagcttggtcacccggtccgtcaatattctgattccgatgacttcgtaggttcctagctcaagccgctcgtgtccaagcgtcacttacgattagctaatgattacggcatctaggaccgactagtggcgcgccgactagctagctaaggtaccgagctcgaattcattccgattaatcgtggcctcttgctcttcaggatgaagagctatgtttaaacgtgcaagcgctactagacaattcagtacattaaaaacgtccgcaatgtgttattaagttgtctaagcgtcaatttgtttacaccacaatatatcctgcca

SEQ ID NO: 277 - DNA, 25365 bp, Artificial Sequence
  PHP100160
gtttacccgccaatatatcctgtcaaacactgcggccgcacttgaccgcggatggagccggagctgtggtgaggccatcgacgggaggtgggggagaacacagtctcagtgttctttgtgagtccgcaaggtttttagcttttctgtattaattaaggttgctgttggctgtagaatacggtcgtggaagagctgtatcggtagctactacgtaagctattatatactggaagtctggagctcgtcgatctccggtcgtcttcctccatttctcctcgtcttgctttgactgctgctaccatttgcttctgttttctgatgaagcatgccatgtcggccaccagtgtttgtgtggtttttgcagggaatggctttcaagtgctgtgattgaatggccctcgtcgtcctcggctgagctcacatggacgcgtcatgtgagtgagatatatgatcatatgatgagtggggttcgggtgagtgcgtacttgaagtaggatcccgctttcactcattcattcattggcctttaaaccgggaaattttcgcgaggagatggagggaagcaagcagggtgacgagtgcagagtgccgcgagcgctttgtcaaaaggcaccgccgtaggcaaaaaaatcaatggccctgactgactcgatggtagtactactgtagagactagagagggttgctccccatatcttcgtgtgacttttactccagcattgcatttccgtcattgagacgttaattaatagcagctttcgggacagatgactgtggccatgtttcgtcacggccgcttcgtgccagctgggggtactatagtactgtgattttgttagtaaaaactttcattaggccaccattgacgaccgggccttcgcttttgctgcgctaattaaccatttcccggcgaccgaagggaacatgaacatgccccgacacatgagggcatgaggactagtgttctccctgtcgttcgttgacttgactagtgatagtttaaacgctcttcaactggaagagcggttactaccggttcactagctagctgctaatcgagctagttaccctatgaggtgacatgaagcgctcacggttactatgacggttagcttcacgactgttggtggcagtagcgtacgacttagctatagttccggacttacccttaagataacttcgtatagcatacattatacgaagttatgggcccacgcgtgaagagcggttaccagagctggtcacctttgtccaccaagatggaactgtcttcggccagaatggccatctggattcagcaggcctagaaggccatttatcgctatcaactttgtatagaaaagttgggccgagctcggtacggccagaatggcccggaccgggttaccaagcggccgcacactgatagtttaaactgaaggcgggaaacgacaatctgatcatgagcggagaattaagggagtcacgttatgacccccgccgatgacgcgggacaagccgttttacgtttggaactgacagaaccgcaacgattgaaggagccactcagccgcgggtttctggagtttaatgagctaagcacatacgtcagaaaccattattgcgcgttcaaaagtcgcctaaggtcactatcagctagcaaatatttcttgtcaaaaatgctccactgacgttccataaattcccctcggtatccaattagagtctcatattcactcccatggcggccaatgcgggcggcggtggagcgggaggaggcagcggcagcggcagcgtggctgcgccggcggtgtgccgccccagcggctcgcggtggacgccgacgccggagcagatcaggatgctgaaggagctctactacggctgcggcatccggtcgcccagctcggagcagatccagcgcatcaccgccatgctgcggcagcacggcaagatcgagggcaagaacgtcttctactggttccagaaccacaaggcccgcgagcgccagaagcgccgcctcaccagcctcgacgtcaacgtgcccgccgccggcgcggccgacgccaccaccagccaactcggcgtcctctcgctgtcgtcgccgccgccttcaggcgcggcgcctccctcgcccaccctcggcttctacgccgccggcaatggcggcggatcggctgtgctgctggacacgagttccgactggggcagcagcggcgctgctatggccaccgagacatgcttcctgcaggactacatgggcgtgacggacacgggcagctcgtcgcagtggccacgcttctcgtcgtcggacacgataatggcggcggccgcggcgcgggcggcgacgacgcgggcgcccgagacgctccctctcttcccgacctgcggcgacgacggcggcagcggtagcagcagctacttgccgttctggggtgccgcgtccacaactgccggcgccacttcttccgttgcgatccaacagcaacaccagctgcaggagcagtacagcttttacagcaacagcaacagcacccagctggccggcaccggcaaccaagacgtatcggcaacagcagcagcagccgccgccctggagctgagcctcagctcatggtgctccccttaccctgctgcagggagtatgtgagagcaacgcgagctgccactgctcttcactgatgtctctggaatggaaggaggaggaagtgagaacagatcattcgacaaagcagcattagtccgttgatcggtggaagaccactcgtcagtgttgagttgaatgtttgatcaataaaatacggcaatgctgtaagggttgttttttatgccattgataatacactgtactgttcagttgttgaactctatttcttagccatgccaagtgcttttcttattttgaataacattacagcaaaaagttgaaagacaaaaaaaaaaacccccgaacagagtgctttgggtcccaagcttctttagactgtgttcggcgttccccctaaatttctccccctatatctcactcacttgtcacatcagcgttctctttccccctatatctccacgctctacagcagttccacctatatcaaacctctataccccaccacaacaatattatatactttcatcttcaactaactcatgtaccttccaatttttttctactaataattatttacgtgcacagaaacttagcaaggagagagagagcgggaatttaaatgctcggcgttaggcttttagtccgctaggtggctagaccgaggttaggacgctagttcactaggggcctagtggtgttttaagacgtcacggtcaccacgcgtggaccgaagcttgcatgcctgcatcactgactagctaaacagcggccgcatcgagcagctggcttgtggggaccagacaaaaaaggaatggtgcagaattgttaggcgcacctaccaaaagcatctttgcctttattgcaaagataaagcagattcctctagtacaagtggggaacaaaataacgtggaaaagagctgtcctgacagcccactcactaatgcgtatgacgaacgcagtgacgaccacaaaactcgagcaacgagatcatgagccaatcaaagaggagtgatgtagacctaaagcaataatggagccatgacgtaagggcttacgcccatacgaaataattaaaggctgatgtgacctgtcggtctctcagaacctttactttttatgtttggcgtgtatttttaaatttccacggcaatgacgatgtgaccgtcgacccactaaaacattgctttgtcaaaagctaaaaaagatgatgcccgacagccacttgtgtgaagcatgagaagccggtccctccactaagaaaattagtgaagcatcttccagtggtccctccactcacagctcaatcagtgagcaacaggacgaaggaaatgacgtaagccatgacgtctaatcccagggcccggtgaccaatcgaattagcttggcgcgtggaccgaagcttgcatgcctgcagtgcagcgtgacccggtcgtgcccctctctagagataatgagcattgcatgtctaagttataaaaaattaccacatattttttttgtcacacttgtttgaagtgcagtttatctatctttatacatatatttaaactttactctacgaataatataatctatagtactacaataatatcagtgttttagagaatcatataaatgaacagttagacatggtctaaaggacaattgagtattttgacaacaggactctacagttttatctttttagtgtgcatgtgttctcctttttttttgcaaatagcttcacctatataatacttcatccattttattagtacatccatttagggtttagggttaatggtttttatagactaatttttttagtacatctattttattctattttagcctctaaattaagaaaactaaaactctattttagtttttttatttaataatttagatataaaatagaataaaataaagtgactaaaaattaaacaaataccctttaagaaattaaaaaaactaaggaaacatttttcttgtttcgagtagataatgccagcctgttaaacgccgtcgacgagtctaacggacaccaaccagcgaaccagcagcgtcgcgtcgggccaagcgaagcagacggcacggcatctctgtcgctgcctctggacccctctcgagagttccgctccaccgttggacttgctccgctgtcggcatccagaaattgcgtggcggagcggcagacgtgagccggcacggcaggcggcctcctcctcctctcacggcaccggcagctacgggggattcctttcccaccgctccttcgctttcccttcctcgcccgccgtaataaatagacaccccctccacaccctctttccccaacctcgtgttgttcggagcgcacacacacacaaccagatctcccccaaatccacccgtcggcacctccgcttcaaggtacgccgctcgtcctcccccccccccctctctaccttctctagatcggcgttccggtccatgcatggttagggcccggtagttctacttctgttcatgtttgtgttagatccgtgtttgtgttagatccgtgctgctagcgttcgtacacggatgcgacctgtacgtcagacacgttctgattgctaacttgccagtgtttctctttggggaatcctgggatggctctagccgttccgcagacgggatcgatttcatgattttttttgtttcgttgcatagggtttggtttgcccttttcctttatttcaatatatgccgtgcacttgtttgtcgggtcatcttttcatgcttttttttgtcttggttgtgatgatgtggtctggttgggcggtcgttctagatcggagtagaattctgtttcaaactacctggtggatttattaattttggatctgtatgtgtgtgccatacatattcatagttacgaattgaagatgatggatggaaatatcgatctaggataggtatacatgttgatgcgggttttactgatgcatatacagagatgctttttgttcgcttggttgtgatgatgtggtgtggttgggcggtcgttcattcgttctagatcggagtagaatactgtttcaaactacctggtgtatttattaattttggaactgtatgtgtgtgtcatacatcttcatagttacgagtttaagatggatggaaatatcgatctaggataggtatacatgttgatgtgggttttactgatgcatatacatgatggcatatgcagcatctattcatatgctctaaccttgagtacctatctattataataaacaagtatgttttataattattttgatcttgatatacttggatgatggcatatgcagcagctatatgtggatttttttagcactgccttcatacgctatttatttgcttggtactgtttcttttgtcgatgctcaccctgttgtttggtgttacttctgcaggtcgactttaacttagcctaggatccatggccactgtgaacaactggctcgctttctccctctccccgcaggagctgccgccctcccagacgacggactccacactcatctcggccgccaccgccgaccatgtctccggcgatgtctgcttcaacatcccccaagattggagcatgaggggatcagagctttcggcgctcgtcgcggagccgaagctggaggacttcctcggcggcatctccttctccgagcagcatcacaaggccaactgcaacatgatacccagcactagcagcacagtttgctacgcgagctcaggtgctagcaccggctaccatcaccagctgtaccaccagcccaccagctcagcgctccacttcgcggactccgtaatggtggcttcctcggccggtgtccacgacggcggtgccatgctcagcgcggccgccgctaacggtgtcgctggcgctgccagtgccaacggcggcggcatcgggctgtccatgattaagaactggctgcggagccaaccggcgcccatgcagccgagggtggcggcggctgagggcgcgcaggggctctctttgtccatgaacatggcggggacgacccaaggcgctgctggcatgccacttctcgctggagagcgcgcacgggcgcccgagagtgtatcgacgtcagcacagggtggagccgtcgtcgtcacggcgccgaaggaggatagcggtggcagcggtgttgccggcgctctagtagccgtgagcacggacacgggtggcagcggcggcgcgtcggctgacaacacggcaaggaagacggtggacacgttcgggcagcgcacgtcgatttaccgtggcgtgacaaggcatagatggactgggagatatgaggcacatctttgggataacagttgcagaagggaagggcaaactcgtaagggtcgtcaagtctatttaggtggctatgataaagaggagaaagctgctagggcttatgatcttgctgctctgaagtactggggtgccacaacaacaacaaattttccagtgagtaactacgaaaaggagctcgaggacatgaagcacatgacaaggcaggagtttgtagcgtctctgagaaggaagagcagtggtttctccagaggtgcatccatttacaggggagtgactaggcatcaccaacatggaagatggcaagcacggattggacgagttgcagggaacaaggatctttacttgggcaccttcagcacccaggaggaggcagcggaggcgtacgacatcgcggcgatcaagttccgcggcctcaacgccgtcaccaacttcgacatgagccgctacgacgtgaagagcatcctggacagcagcgccctccccatcggcagcgccgccaagcgcctcaaggaggccgaggccgcagcgtccgcgcagcaccaccacgccggcgtggtgagctacgacgtcggccgcatcgcctcgcagctcggcgacggcggagccctggcggcggcgtacggcgcgcactaccacggcgccgcctggccgaccatcgcgttccagccgggcgccgccagcacaggcctgtaccacccgtacgcgcagcagccaatgcgcggcggcgggtggtgcaagcaggagcaggaccacgcggtgatcgcggccgcgcacagcctgcaggacctccaccacctgaacctgggcgcggccggcgcgcacgactttttctcggcagggcagcaggccgccgccgctgcgatgcacggcctgggtagcatcgacagtgcgtcgctcgagcacagcaccggctccaactccgtcgtctacaacggcggggtcggcgacagcaacggcgccagcgccgtcggcggcagtggcggtggctacatgatgccgatgagcgctgccggagcaaccactacatcggcaatggtgagccacgagcaggtgcatgcacgggcctacgacgaagccaagcaggctgctcagatggggtacgagagctacctggtgaacgcggagaacaatggtggcggaaggatgtctgcatgggggactgtcgtgtctgcagccgcggcggcagcagcaagcagcaacgacaacatggccgccgacgtcgggcatggcggcgcgcagctcttcagtgtctggaacgacacttaagcgtacctagtggtacctgacatcttatagtctgcaacctctcgtgtctgaattcctatctttatcaagtgttattgcttccacgactataggacagctttcgtcgaaagcttttgctcatgtgatctcgaaggattcatctagtctgatttttcgtgacttgtatcggttttattggattcatccaacatatatcaataaaaaatgagttgtgtttcctttcttcctagttcagttaaaattatttccctcctgcgcttgtgctgtaattgtctgtgtacctgttgtttgtgactgtgttagttcccttggatatgatttcgtatttgatatgtacatggagatagcttagcttcattattggagtatgaagttagtatgacatagtcactctcctggaaaattgacactgcaaaccatatttttattctgaaccacaaatcctagtcagtccgctggcatatgccgtccgtttgctgaatccagaacgtgggtttggagatgtacggctgagatgcctctatgcgaaggggatttcgtggtgaaacgagatgggagtagagcaacgcccgtggaagatgcttcaaacttccacacttttgagcaacgatcggcagtagtaaggtagacgatttcaagatcaaagcatatgaagataaacaacatcaacaacaaaatttgttggggttctatagagagaaacagagctacatacatacactgttttgtatctaccatctgagatgatgaaaagatgaaaaactaaagaatgccccggcgccaacgccaggacacgccgcgcgcgcgtcacccgagccatctcttgacccagccggcgctgtatatttacacacgttgcagcatcgatcaccacctgttcgatcgcgtcgccgtcaccggcgcgccgcgacttattgaactagtctagggcgcggctaacaacctagcttagattgccttgtctaaacccttaggctaacgcgccacggtaacccggtccgggcctagaaggccccagagctggtcaccccatacgattggaagcttcaagtttgtacaaaaaagcaggctccggccagagttacccggaccgaagcttgcatgcctgcagtgcagcgtgacccggtcgtgcccctctctagagataatgagcattgcatgtctaagttataaaaaattaccacatattttttttgtcacacttgtttgaagtgcagtttatctatctttatacatatatttaaactttactctacgaataatataatctatagtactacaataatatcagtgttttagagaatcatataaatgaacagttagacatggtctaaaggacaattgagtattttgacaacaggactctacagttttatctttttagtgtgcatgtgttctcctttttttttgcaaatagcttcacctatataatacttcatccattttattagtacatccatttagggtttagggttaatggtttttatagactaatttttttagtacatctattttattctattttagcctctaaattaagaaaactaaaactctattttagtttttttatttaataatttagatataaaatagaataaaataaagtgactaaaaattaaacaaataccctttaagaaattaaaaaaactaaggaaacatttttcttgtttcgagtagataatgccagcctgttaaacgccgtcgacgagtctaacggacaccaaccagcgaaccagcagcgtcgcgtcgggccaagcgaagcagacggcacggcatctctgtcgctgcctctggacccctctcgagagttccgctccaccgttggacttgctccgctgtcggcatccagaaattgcgtggcggagcggcagacgtgagccggcacggcaggcggcctcctcctcctctcacggcaccggcagctacgggggattcctttcccaccgctccttcgctttcccttcctcgcccgccgtaataaatagacaccccctccacaccctctttccccaacctcgtgttgttcggagcgcacacacacacaaccagatctcccccaaatccacccgtcggcacctccgcttcaaggtacgccgctcgtcctcccccccccccctctctaccttctctagatcggcgttccggtccatgcatggttagggcccggtagttctacttctgttcatgtttgtgttagatccgtgtttgtgttagatccgtgctgctagcgttcgtacacggatgcgacctgtacgtcagacacgttctgattgctaacttgccagtgtttctctttggggaatcctgggatggctctagccgttccgcagacgggatcgatttcatgattttttttgtttcgttgcatagggtttggtttgcccttttcctttatttcaatatatgccgtgcacttgtttgtcgggtcatcttttcatgcttttttttgtcttggttgtgatgatgtggtctggttgggcggtcgttctagatcggagtagaattctgtttcaaactacctggtggatttattaattttggatctgtatgtgtgtgccatacatattcatagttacgaattgaagatgatggatggaaatatcgatctaggataggtatacatgttgatgcgggttttactgatgcatatacagagatgctttttgttcgcttggttgtgatgatgtggtgtggttgggcggtcgttcattcgttctagatcggagtagaatactgtttcaaactacctggtgtatttattaattttggaactgtatgtgtgtgtcatacatcttcatagttacgagtttaagatggatggaaatatcgatctaggataggtatacatgttgatgtgggttttactgatgcatatacatgatggcatatgcagcatctattcatatgctctaaccttgagtacctatctattataataaacaagtatgttttataattattttgatcttgatatacttggatgatggcatatgcagcagctatatgtggatttttttagccctgccttcatacgctatttatttgcttggtactgtttcttttgtcgatgctcaccctgttgtttggtgttacttctgcaggtcgactttaacttagcctaggatccatggcctcttcatctgcacccaggttccgtgtctattccaagtacctctttctaacatatcctgaatgtacccttgagccacagtacgccttggattcacttcgcactctcttgaacaaatatgagcccctctacatcgctgctgttagagagctccacgaagatggatcaccacatctgcacgttctcgtgcagaacaagcttcgtgcttccatcaccaatcccaatgccttaaacctccgtatggatacatctccattctccatattccatccaaatatacaagctgccaaagactgcaaccaagttcgtgattacatcacgaaggaggttgactccgatgtaaacacagctgagtggggaacattcgtggctgtttcaactccaggtcgtaaagaccgtgatgcggatatgaaacagatcattgaatctagttcctctcgcgaggaattcctcagcatggtttgcaatcgttttccgtttgaatggtctatccgtctcaaagacttcgagtacacggcacgccatctatttcctgacccagttgccacttacacacctgagtttccaaccgaatcactcatttgccatgagaccattgaaagctggaaaaatgaacatctctactctctgtccctcgagagctacatcctgtgcaccagcacccctgccgaccaggcccagtccgacctcgaatggatggacgactacagccgtagtcaccggggaggcataagtccatctacatctgcgggccaaccagaacaggaaagacttcctgggcaaggtctctagggtaccgttaacagatctactaactatctatactgtaataatgttgtatagccgccggatagctagctagtttagtcattcagcggcgatgggtaataataaagtgtcatccatccatcaccatgcgtggcaacgtgagcaatgacctgattgaacaaattgaaatgaaaagaagaaatatgttatatgtcaacgagatttcctcataatgccactgacgacgtgtgtccaagaaatgtatcagtgatacgtatattcacaatttttttatgacttatactcacaatttgtttttttactacttatactcacaatttgttgtgcgtaccataacaatttcgatcgaatatatatcagaaagttgacgaaagtaagctcactcaaaaagttaaatgggctgcggaagctgcgtcaggcccaagttttggctattctatccggtatccacgattttgatggctgagggacatatgttcgcttaagcttcggtccgggcctagaaggccgatctcccgggcacccagctttcttgtacaaagtggccgttaacggatcggccagaatggcccggaccgggttaccccgcggttcaaagccaatgactgttgttaggtccagtttctaaggacgaatcatccaatcactggttctttctgaacaaaacaaagagctatagagttacgttactgtagccgagacagagcctgcaatctggttatgccacatactaggttctttcttaaagttgactcactctatcctaagttctacttacaaggagctacaacaaattggtcataaccggagagcgttcaaggaggtaatatcccatcttactctgtagcaaggctacaaaaggagagctaaagaactaggctacaaaaagagagctaaagaactaactatctagcaagactacagagctatagtgtagagatttcataaccggtgagcgttcaaggatactttgaagagaagaggtaatatctcaactagcaagactacaaaaaaatggagatataaaactaactgtctaacaagactacagagctatagtagagatagatacgttcgacacttaagcatgagaattcgagctcggtaccctggttcacaaactcaatacaacacacagtggagtagggtattacgctccggcggcccgaaccactctaaatccttgtgtcctcgtgtgctcttccaccattaatgactgtaattgcagggacacgaagagttgtagcgcttttgccaacaagatccgctatatgctagtagagtggaacctgcacagcaacaagcatccaataatctgagaataagaattatgtgtggtgatggttctcatctctgcaactcgccattttcgcgagagaaccaaatccaagttggtgaagatcatgatttgggctcatgggctggcatagtagctattacctttgcaattgtggttcgaatctatccgatattctccttttcagggagagctaatgcttatgcttattgggtattttggtttgacactgcttcacgcccaaaaaaaggcaactatgtctgagttggatatggcccaaaaaaaggcagctatgtctgagttggatatggaagtcttctttcgtttagggtgaagtaagaccaagctcatgagcttattatcttaggtcggaacaaattagttgataggcatggcacatttatcaaattataatgattttaacagaaaagcaacacctctttttcagcagcaccagctttgcaagctgcaattgacactccaagcatagtatttgctccaaactcagcctgcatttcgcacaatatcatatctatttccatttggataaaatatattttccagaaatatgggaacagaatcaagatacagaaaaaagttgtggtagtagtggtaagtggaaacacaagtacagtgaaaagatagcattatttctgaacagtcaaattaaccgaaataagtagtatcacatactgcccctaaattgactacacccaatgtaaagaattgcttgagcatattgagccatcagttgtttgtttgtgtaacggatttgacaatgcagagttcaggagcaaaaaaccgcaaaggagagaaagagggaaaggatctcctagtatcccaccttgtggcgcgccctgtcaagtgcatgatggcctggtcgatctgcgtctgctgctgcggttccatcccaacgagtgcctccgacaccttgtcgttgatcacccgcaccgcgtaggcgacccccctggcgaggaacttccgcctctcggaggccccggccgcgtcggcggcggcgccctcgagcgcgcccacgctagccgtagatgctcggtgcacggccttgttggtgtgcaactcgacctcaacggccggtgcgctacgcccgtcaaggatctggcgcgcccgcaccctcgtgatcacggtgggcgcctcccgcctcatgtggccgacgatgaaaagcgccgggttaggggccttggcgcgcaccgccgtattcagggcctcctcgctcttgcgcgagagcaggtgcttccccaggtactcctgcactgacaaggctgccacagcggtggaatttgtcctcacgacttcgccacgtcgtcctcacctccctggcttcccacgactccgccgtatcgaggtgctcggtgggtcgtcttaatccgaagtccgaactaggaagacgagacagagaggtctgaggaatgggcctcgtttgatgttgagctgaattatttttccagcataagcccaggtcttggtccatgaacaaaattactagaaacccagcccagtactacgatctaaaagagggactgccactggatagctctctctagcattctccacgctccaatacagcggcgtcgtgtctatccgggtctatccgcgaacacgtgagaactctccagaaactgctttctcctccacttcatctctctcgctttccctctataaaaagaccccttctaggaattgagggagacagcaagcaccaagcagcgatccgaagctcaatcaattcactcaaacctcttccccaaatcttcgattagatcttcgttgacaagaagactagaaccgaacctgacatgtccaacctgctcacggttcaccagaaccttccggctcttccagtggacgcgacgtccgatgaagtcaggaagaacctcatggacatgttccgcgacaggcaagcgttcagcgagcacacctggaagatgctgctctccgtctgccgctcctgggctgcatggtgcaagctgaacaacaggaagtggttccccgctgagcccgaggacgtgagggattaccttctgtacctgcaagcgcgaggtttgtttctgcttctacctttgatatatatataataattatcattaattagtagtaatataatatttcaaatatttttttcaaaataaaagaatgtagtatatagcaattgcttttctgtagtttataagtgtgtatattttaatttataacttttctaatatatgaccaaaacatggtgatgcctaggtctggcagtgaagaccatccagcaacaccttggacaactgaacatgcttcacaggcgctccggcctcccgcgccccagcgactcgaacgccgtgagcctcgtcatgcgccgcatcaggaaggaaaacgtcgatgccggcgaaagggcaaagcaggccctcgcgttcgagaggaccgatttcgaccaggtccgcagcctgatggagaacagcgacaggtgccaggacattaggaacctggcgttcctcggaattgcatacaacacgctcctcaggatcgcggaaattgcccgcattcgcgtgaaggacattagccgcaccgacggcggcaggatgcttatccacattggcaggaccaagacgctcgtttccaccgcaggcgtcgaaaaggccctcagcctcggagtgaccaagctcgtcgaacgctggatctccgtgtccggcgtcgcggacgacccaaacaactacctcttctgccgcgtccgcaagaacggggtggctgcccctagcgccaccagccaactcagcacgagggccttggaaggtattttcgaggccacccaccgcctgatctacggcgcgaaggatgacagcggtcaacgctacctcgcatggtccgggcactccgcccgcgttggagctgctagggacatggcccgcgccggtgtttccatccccgaaatcatgcaggcgggtggatggacgaacgtgaacattgtcatgaactacattcgcaaccttgacagcgagacgggcgcaatggttcgcctcctggaagatggtgactgaggtacccaacctagacttgtccatcttctggattggccaacttaattaatgtatgaaataaaaggatgcacacatagtgacatgctaatcactataatgtgggcatcaaagttgtgtgttatgtgtaattactagttatctgaataaaagagaaagagatcatccatatttcttatcctaaatgaatgtcacgtgtctttataattctttgatgaaccagatgcatttcattaaccaaatccatatacatataaatattaatcatatataattaatatcaattgggttagcaaaacaaatctagtctaggtgtgttttgcgatccgatatcgaattggccacggtaccagctgctgctgttctagggttcacaagtctgcctatttgtcttccccaatggagctatggttgtctggtctggtccttggtcgtgtcccgtttcattgtgtactatttacctgtaatgtgtatccttaagtctggtttgatggtgtctgaaacgttttgctgtggtagagcagcatggaagaactataatgaataagtgatccctaatcattgtgtccaaattttgcttctgctatacccttttgtgctgtttcttatgttttgcttaaaaatttgatctgacaaacaaatttgtctaaattatgctcttgttctgactgtgtactgtacacatttgtattgctaccggtttggcacatagttttctctttgattgcagatcaaacccttctgattgcagattgcttggctatggctgatgtgctcactgttcttctttagcttgtatattgctgatggtggcttggctacggctgaaaaagttgctgctgcgccgacttggcaactgttgctccagtaatgctttgtcctctcttcctagccgccgacttggcacttggcagctgttgctcctgtaatgcgttgttatctcttatctcttgagatgtactatgattttgaggctgtttgacttgtgccagattgccagtgctgatgctatattatctcaggtttttatgctagtatatgttttactgtgtgctgcctgtgtcgagttacgtaatctattgaaccgctatgcgtgttgatgccctgttgttgcttgccagattgatgcccctgttgcttgcagcttgcaagctgtagtgaaatcctaaaattccaaaccaaatctattctgaacttttgaagatctgtgatgtccggaagaaaagattcaaacagataaacgggactctccagaatctataaaataaatgatcgacaaacgctttgctttggtaggcttcaagcttggtcacccggtccgggcctagaaggccagcttcggccgccccgggcaactttattatacaaagttgatagataaatcagatatctggttcctaaggacccggcggaccgattaaactgattcggtccgacgcgttacctaataacttcgtatagcatacattatacgaagttattagctaactaactagtaagcttaagccatgggtcgacggatccgttaactagcgtggcatttggcaccgccgcacactatgcgagctaggagtgctagtttacagatgaaactatgaaaccaagaaaacacaattgtccgtagctagcgcgtggcgtcgtgtcaagcttcacacagtatcttcgttcttcactataaatcgcgcctgttgttcgtgagacccaccaccgtggataacagtcccctaataataagcgatcaacagcactgctgatggctgaacaccgaggcgccgccgcgcgtaaccatccgccggagcagcccgtcgtgccggcgaacgacgccttccccgaccgcgcccagcagctctgcctcgacgccgggcgcgcgctcgcgatgtgcggcgtgctcgtcgccgtccctcccgcattttacgcgtcgacgtcgcggacgacaccgcacttgccttcgtcggcttcgtcctctggatcatcggtgcgtggctgtgcctcctggcgctcacgcccttggctccacgggcggtgagggcgggcggggccgccgccagcaccttgctgatcaggtgcctgtccctttcatgaactactagcgcccgcgcccgcggccgccgggcacaagagaacacatcgatgttcgctgcgtacgtcagcaataaggcactctttgtcagtagtcgagtgcatatgttgggtgtttgccctgggagatttcaagtgttgtggccattatcccgcaggataaaaaatcggcggcttttggattgatacggaaaataacgatgtttcatgctcgtgttgtgtgtgtgacatcttgtcagccaagtttttaaccgttgctactccccctctgtgggctcagtgtgtggaccggaatacgtcgtacataggccgtagcctaagcccaatatgccgtttttcaggttggcctgtgtgacgacaagcgggtctcaaaagcccatcacgcaactggcctgcaattattggaggagagcgcgtcgagttggttccagaggctgcgtggtggggccggactctgcgacgacctctcgttcgcgtccgatttggttgccgtgagccgtgacgtaacgcctccttccgttcctccctatataagttccacccccgggtccggtttccccaagccccagtgacccccgatcccgatcgcgaaatctccgcacccgccggcaagggaccgaagcaagcctctctcccgaccgtcgcatcaaggtacgcgtccgctcgatctgtcctcttccttctcgatttgacttgctgtggtgcccgatcacgggatcagaatcgcaccagtgtagatttcgcatgttctaagatgtgttagtttccaggctaatccagttctcttgacgcccgatccgatcgagctccgtgtttatttcagcctaatcgtagtattcccctaaaatttcctcattagggggttcgcaagattgttggtcgacaggttcacttatgctcgatcgcttacttttagtcgattcatgctgcgtactattgttgccccccgtggttttatcttttctcgtgtgaaatccagtagatatagtagatatcgtagcattaggttttaattcaatcgattgattattgtatcatcaaaattgagaagttcgaatcatgcctatcatgctgcctcaaccgaaatcctgtatattgaagtttcaattcaattgattgatcattcattagattcaaccaaaatctagaaggttagatgacgcatgtcatgctgcctgcgtagtttacctttgatctgtttatgattaccttatcagtaggatatttgtgattttgggaagtagcactaactgattcatgctgacatgatgttccctttcagattatactgttgagtcctatctaattgatgctttgtatgctatatgaatacgtcatggtaaattagcagttaattagcatattagcaattgggcgtacctcatcaggattgctcttgtagatgtgtgtggtgatgtttcttgttcaattcatgttctgctttaaaagtatgtgttctctgtttgttaattaagattcatggttataatgatttggacctaattaatcagggttgcccttttagatgcgtggttacttgttgagttcatttttttcctgctatagttgtatgcgtttgttcattcatggttagatttgatttgtttcttctctattccatgccttccatatacttcaattgtagcttaacatgagatttctgtatatgcaggtcgaccgccggggatccacacgacaccatggcccagtccaagcacggcctgaccaaggagatgaccatgaagtaccgcatggagggctgcgtggacggccacaagttcgtgatcaccggcgagggcatcggctaccccttcaagggcaagcaggccatcaacctgtgcgtggtggagggcggccccttgcccttcgccgaggacatcttgtccgccgccttcatgtacggcaaccgcgtgttcaccgagtacccccaggacatcgtcgactacttcaagaactcctgccccgccggctacacctgggaccgctccttcctgttcgaggacggcgccgtgtgcatctgcaacgccgacatcaccgtgagcgtggaggagaactgcatgtaccacgagtccaagttctacggcgtgaacttccccgccgacggccccgtgatgaagaagatgaccgacaactgggagccctcctgcgagaagatcatccccgtgcccaagcagggcatcttgaagggcgacgtgagcatgtacctgctgctgaaggacggtggccgcttgcgctgccagttcgacaccgtgtacaaggccaagtccgtgccccgcaagatgcccgactggcacttcatccagcacaagctgacccgcgaggaccgcagcgacgccaagaaccagaagtggcacctgaccgagcacgccatcgcctccggctccgccttgccctccggactcagatctcgatagagtcaacctagacttgtccatcttctggattggccaacttaattaatgtatgaaataaaaggatgcacacatagtgacatgctaatcactataatgtgggcatcaaagttgtgtgttatgtgtaattactagttatctgaataaaagagaaagagatcatccatatttcttatcctaaatgaatgtcacgtgtctttataattctttgatgaaccagatgcatttcattaaccaaatccatatacatataaatattaatcatatataattaatatcaattgggttagcaaaacaaatctagtctaggtgtgttttgcgaattgcggcgcccttactttaacgcctctaaccaacacccctttatctttataaggaacaataaacagaatttgccccactgttctaaatcacctaataatatccccagctaaaaacaataaaggtttcctagaattaagacaagcatgactgttcctccaggagggtttggaacattgttgcagtcttgcagatacgggcgaagggtgagaaacagagcggagggctggaggtgacctcggtagtcgacgccggagttgagcttgacaacgacggggcggcccctgatggacttgaggaagtccgatggcgtcttcaccgtcccgccggcgcccgaggcgggcctgtcgctgccgccgccgccgctgctcatcttgcgcgctgtgcccccggcggtgtccctgtgttgcggatcgcgggtgggccaggtggatgcgagggcgacccgtttggactccggccggagccgccggatccctggtcggtgtcagtgccgtttactctgggccccacgtgtcagtaccgtctgtagatgacaacaacccgtcgtccacagtcatgtccaaaatatcctttcttcttttttttcgattcggatatctatcttccttttttttttccaaaaatcttcttgacgcaccagcgcgcacgtttgtggtaaacgccgacacgtcggtcccacgtcgatagaccccacccaccagtgagtagcgtgtacgtattcgggggtgacggacgtgtcgccgtcgtcttgctagtcccattcccatctgagccacacatctctgaacaaaaaaaaggagggaggcctccacgcacatccccctccgtgccacccgccccaaaccctcgcgccgcctccgagacagccgccgcaaccatggccaccgccgccgccgcgtctaccgcgctcactggcgccactaccgctgcgcccaaggcgaggcgccgggcgcacctcctggccacccgccgcgccctcgccgcgcccatcaggtgctcagcggcgtcacccgccatgccgatggctcccccggccaccccgctccggccgtggggccccaccgagccccgcaagggtgctgacatcctcgtcgagtccctcgagcgctgcggcgtccgcgacgtcttcgcctaccccggcggcgcgtccatggagatccaccaggcactcacccgctcccccgtcatcgccaaccacctcttccgccacgagcaaggggaggcctttgccgcctccggctacgcgcgctcctcgggccgcgtcggcgtctgcatcgccacctccggccccggcgccaccaacctagtctccgcgctcgccgacgcgctgctcgattccgtccccatggtcgccatcacgggacaggtggcgcgacgcatgattggcaccgacgccttccaggagacgcccatcgtcgaggtcacccgctccatcaccaagcacaactacctggtcctcgacgtcgacgacatcccccgcgtcgtgcaggaggctttcttcctcgcctcctctggtcgaccagggccggtgcttgtcgacatccccaaggacatccagcagcagatggcggtgcctgtctgggacaagcccatgagtctgcctgggtacattgcgcgccttcccaagccccctgcgactgagttgcttgagcaggtgctgcgtcttgttggtgaatcgcggcgccctgttctttatgtgggcggtggctgcgcagcatctggtgaggagttgcgacgctttgtggagctgactggaatcccggtcacaactactcttatgggcctcggcaacttccccagcgacgacccactgtctctgcgcatgctaggtatgcatgggacggtgtatgcaaattatgcagtggataaggccgatctgttgcttgcacttggtgtgcggtttgatgatcgcgtgacagggaagattgaggcttttgcaagcagggctaagattgtgcacgttgatattgatccggctgagattggcaagaacaagcagccacatgtgtccatctgtgcagatgttaagcttgctttgcagggcatgaatgctcttcttgaaggaagcacatcaaagaagagctttgactttggctcatggaacgatgagttggatcagcagaagagggaattcccccttgggtataaaacatctaatgaggagatccagccacaatatgctattcaggttcttgatgagctgacgaaaggcgaggccatcatcggcacaggtgttgggcagcaccagatgtgggcggcacagtactacacttacaagcggccaaggcagtggttgtcttcagctggtcttggggctatgggatttggtttgccggctgctgctggtgcttctgtggcaaacccaggtgtcactgttgttgacatcgatggagatggtagctttctcatgaacgttcaggagctagctatgatccgaattgagaacctcccagtgaaggtctttgtgctaaacaaccagcacctggggatggtggtgcagttggaggacaggttctataaggccaacagagcgcacacatacttgggaaacccagagaatgaaagtgagatatatccagatttcgtgacgatcgccaaagggttcaacattccagcggtccgtgtgacaaagaagaacgaagtccgcgcagcgataaagaagatgctcgagactccagggccgtacctcttggatataatcgtcccacaccaggagcatgtgttgcctatgatccctagtggtggggctttcaaggatatgatcctggatggtgatggcaggactgtgtactgactagctagtcagttaacagatctgccagatcctcggtgtacaaataacccgtcttatcctatgagacgggccggcgtcagtgtgttctggaggaatttttatgtcagagcctttttctttgtgtgcttgatgtagatgccaagggaagcttattggctgttgaagcttgatgcaaaataaattatggaactctgttttttgtttatctaataataactagcaaatatgcttccattgcattgaaactaacagccttttgtgtttccaagttttattttgtgacaatgtcatctatttcaattagttgtggaatcggaaacttgcaggactaacttggaaactccaatccctcagcatcctggactttttcctggtgtaatccatgtagatattattttaatcatcattttagttctggaggtttttccatctccggttttgctcccctttcttcaaaaaaaaaaaaaaaatgccgtaggcgccgcaacgcccacctgttgttcaaactcatgggcacgagtggctcgaagattttatacaacaattgctgtagtttcaccgttgctggtgaagaagcatttttttaaaaaaatatagtggtattcattttaattagtttagttgtgcagcgagcaaaatttggacatgctctgctcggaatctgatcgacctagacacagattagcagcagtagctttgtcatctgttccaagagttgcgatctgatagaagaaaaaaaaaccttcccttcaatgtaaaaccgaaactaacaagaaagaagcacagtgccgtttaggcaagtatggagtacgtattaagcatgtagaaggccatgcatgaaccactaacaagaaagaagcgcagtgccattcaggcaagcataagcatgtagattggcatgcatgaacaactaacagtagatcgtctctggtctgattagaagttttttgggaagccaagaaatcatgtacaactggttccatctcaaattccgtggcaaaaagaggcctaagcaacatacctcgagtagatcacattcaagcttggtcacccggtccgtcaatattctgattccgatgacttcgtaggttcctagctcaagccgctcgtgtccaagcgtcacttacgattagctaatgattacggcatctaggaccgactagtggcgcgccgactagctagctaaggtaccgagctcgaattcattccgattaatcgtggcctcttgctcttcaggatgaagagctatgtttaaacgtgcaagcgctactagacaattcagtacattaaaaacgtccgcaatgtgttattaagttgtctaagcgtcaatttgtttacaccacaatatatcctgcca

SEQ ID NO: 278 - DNA, 23204 bp, Artificial Sequence
  PHP100229
gtttacccgccaatatatcctgtcaaacactgcggccgcacttgaccgcggatggagccggagctgtggtgaggccatcgacgggaggtgggggagaacacagtctcagtgttctttgtgagtccgcaaggtttttagcttttctgtattaattaaggttgctgttggctgtagaatacggtcgtggaagagctgtatcggtagctactacgtaagctattatatactggaagtctggagctcgtcgatctccggtcgtcttcctccatttctcctcgtcttgctttgactgctgctaccatttgcttctgttttctgatgaagcatgccatgtcggccaccagtgtttgtgtggtttttgcagggaatggctttcaagtgctgtgattgaatggccctcgtcgtcctcggctgagctcacatggacgcgtcatgtgagtgagatatatgatcatatgatgagtggggttcgggtgagtgcgtacttgaagtaggatcccgctttcactcattcattcattggcctttaaaccgggaaattttcgcgaggagatggagggaagcaagcagggtgacgagtgcagagtgccgcgagcgctttgtcaaaaggcaccgccgtaggcaaaaaaatcaatggccctgactgactcgatggtagtactactgtagagactagagagggttgctccccatatcttcgtgtgacttttactccagcattgcatttccgtcattgagacgttaattaatagcagctttcgggacagatgactgtggccatgtttcgtcacggccgcttcgtgccagctgggggtactatagtactgtgattttgttagtaaaaactttcattaggccaccattgacgaccgggccttcgcttttgctgcgctaattaaccatttcccggcgaccgaagggaacatgaacatgccccgacacatgagggcatgaggactagtgttctccctgtcgttcgttgacttgactagtgatagtttaaacgctcttcaactggaagagcggttactaccggttcactagctagctgctaatcgagctagttaccctatgaggtgacatgaagcgctcacggttactatgacggttagcttcacgactgttggtggcagtagcgtacgacttagctatagttccggacttacccttaagataacttcgtatagcatacattatacgaagttatgggcccacgcgtgaagagcggttaccagagctggtcacctttgtccaccaagatggaactgtcttcggccagaatggccatctggattcagcaggcctagaaggccatttatcgctatcaactttgtatagaaaagttgggccgaattcgagctcggtacggccagaatggcccggaccgaagcttgtcatgtgccatgagtttggttagcagatacatggctaatcctgatagaatgcattggaaagttgttaagtggattttcaagtacttatatggtacgtctaatgcttgtttgtagtttggcaagtcaaagagggacttgttggatatgttgattcagattatggagcagttttgtataagagaagatcattaatagattatgtattcacggttggtggatgtgtaattagctggagggtttgcctaattccgacagttgttttgtctactacagaggttgagtatattgcagcttgtgatgctagcaaataggtcgtttggttgaaaggtctatatgctgagttttatggagatacatattgcattacattgttctgtgacagttagagtgctatttgccttacaaaggattagatgtttcatgagaggataaagcacattgatattatcattatatatgggaaatagttgcaaaaggtaatttgagggtatgcaagattagtacacacttcaatccagcgatgactaaatctgttactgggtgctaagtttgagctttgctcgaacttagttggtataattgcttagccctagcggctatgttggcacgacattttgttccttctattatttagaaagttgcttacaaattttggctacaagatggaatttgtctcgaggtaagattgttgagtttgtgatccaaattctggataaggggtcgagttggtgagcgaagtggaggcccgtcgccagaggtttgagccgaccctaattagggtttctgttgcgccatcatcataaccatcttgtaagccgtcgtctaagtacgacgttctgtaaagactccaaattacagtgaaggtttcgtctgactggtatctgtggtttttcccttcgcagtgaaggattttctatgtaaatctatatgtcgtgatctgtaattgtggttgattacttcatttttatgcccgtcgactctgctaacaaatataaatttatgtttttactaagacttaaacatagttaagtattgctaacagaatataggaaaacgatgcttcattttgaaaaaataggaaaaataacacaaactgtataaggaagaaaaaaaatatatagttggatattgaagtaatagcgtagaccccattgccctaaacgaaaagcccaaactaaatatagattcattcggctccaatccaactcaatccagctcagaccaaccgcaactcaacccagcttttatataataatagaatcatcagtattatagctaaaaataaactaacagttacaaaactagtctatcaaacaagccgttactatatccactctttaactaggttagacccgtggatgcaccacaggccagacagttggcctaaatccggcacagctattgggccgatctggcccggacacgcttttagtcctgctagaccgtactcgtgccgggtcacagacctactgccgggcgaatccatttagatatgtgtacctgttaccccaactctagtcgtcggaaccccaaccgagttccccagtactccgcagtccgcacggccgcatccgtcaagatccgcgaagagcaacgaggcgaggcgaggggagggaaaacaagtgagtgagagagagagagagaggagggaaacccgggggatctcgactctagaggatcgctcaggaaggccgctgagatagaggcatggcggccaatgcgggcggcggtggagcgggaggaggcagcggcagcggcagcgtggctgcgccggcggtgtgccgccccagcggctcgcggtggacgccgacgccggagcagatcaggatgctgaaggagctctactacggctgcggcatccggtcgcccagctcggagcagatccagcgcatcaccgccatgctgcggcagcacggcaagatcgagggcaagaacgtcttctactggttccagaaccacaaggcccgcgagcgccagaagcgccgcctcaccagcctcgacgtcaacgtgcccgccgccggcgcggccgacgccaccaccagccaactcggcgtcctctcgctgtcgtcgccgccgccttcaggcgcggcgcctccctcgcccaccctcggcttctacgccgccggcaatggcggcggatcggctgtgctgctggacacgagttccgactggggcagcagcggcgctgccatggccaccgagacatgcttcctgcaggactacatgggcgtgacggacacgggcagctcgtcgcagtggccacgcttctcgtcgtcggacacgataatggcggcggccgcggcgcgggcggcgacgacgcgggcgcccgagacgctccctctcttcccgacctgcggcgacgacggcggcagcggtagcagcagctacttgccgttctggggtgccgcgtccacaactgccggcgccacttcttccgttgcgatccagcagcaacaccagctgcaggagcagtacagcttttacagcaacagcaacagcacccagctggccggcaccggcaaccaagacgtatcggcaacagcagcagcagccgccgccctggagctgagcctcagctcatggtgctccccttaccctgctgcagggagtatgtgagagcaacgcgagctgccactgctcttcactgatgtctctggaatggaaggaggaggaagtgagcatagcgttggtgcgttgctgtcaagggcgaattcacatggttaacctagacttgtccatcttctggattggccaacttaattaatgtatgaaataaaaggatgcacacatagtgacatgctaatcactataatgtgggcatcaaagttgtgtgttatgtgtaattactagttatctgaataaaagagaaagagatcatccatatttcttatcctaaatgaatgtcacgtgtctttataattctttgatgaaccagatgcatttcattaaccaaatccatatacatataaatattaatcatatataattaatatcaattgggttagcaaaacaaatctagtctaggtgtgttttgcgaatgcggccgccaccgcggtggagctcgaattccggtccgggcctagaaggccagcttcaagtttgtacaaaaaagcaggctccggccagaatctcactgactagctaaacagcggccgcatcgagcagctggcttgtggggaccagacaaaaaaggaatggtgcagaattgttaggcgcacctaccaaaagcatctttgcctttattgcaaagataaagcagattcctctagtacaagtggggaacaaaataacgtggaaaagagctgtcctgacagcccactcactaatgcgtatgacgaacgcagtgacgaccacaaaactcgagcaacgagatcatgagccaatcaaagaggagtgatgtagacctaaagcaataatggagccatgacgtaagggcttacgcccatacgaaataattaaaggctgatgtgacctgtcggtctctcagaacctttactttttatgtttggcgtgtatttttaaatttccacggcaatgacgatgtgaccgtcgacccactaaaacattgctttgtcaaaagctaaaaaagatgatgcccgacagccacttgtgtgaagcatgagaagccggtccctccactaagaaaattagtgaagcatcttccagtggtccctccactcacagctcaatcagtgagcaacaggacgaaggaaatgacgtaagccatgacgtctaatcccagggcccggtgaccaatcgaattagcttggcgcgtggaccgaagcttgcatgcctgcagtgcagcgtgacccggtcgtgcccctctctagagataatgagcattgcatgtctaagttataaaaaattaccacatattttttttgtcacacttgtttgaagtgcagtttatctatctttatacatatatttaaactttactctacgaataatataatctatagtactacaataatatcagtgttttagagaatcatataaatgaacagttagacatggtctaaaggacaattgagtattttgacaacaggactctacagttttatctttttagtgtgcatgtgttctcctttttttttgcaaatagcttcacctatataatacttcatccattttattagtacatccatttagggtttagggttaatggtttttatagactaatttttttagtacatctattttattctattttagcctctaaattaagaaaactaaaactctattttagtttttttatttaataatttagatataaaatagaataaaataaagtgactaaaaattaaacaaataccctttaagaaattaaaaaaactaaggaaacatttttcttgtttcgagtagataatgccagcctgttaaacgccgtcgacgagtctaacggacaccaaccagcgaaccagcagcgtcgcgtcgggccaagcgaagcagacggcacggcatctctgtcgctgcctctggacccctctcgagagttccgctccaccgttggacttgctccgctgtcggcatccagaaattgcgtggcggagcggcagacgtgagccggcacggcaggcggcctcctcctcctctcacggcaccggcagctacgggggattcctttcccaccgctccttcgctttcccttcctcgcccgccgtaataaatagacaccccctccacaccctctttccccaacctcgtgttgttcggagcgcacacacacacaaccagatctcccccaaatccacccgtcggcacctccgcttcaaggtacgccgctcgtcctcccccccccccctctctaccttctctagatcggcgttccggtccatgcatggttagggcccggtagttctacttctgttcatgtttgtgttagatccgtgtttgtgttagatccgtgctgctagcgttcgtacacggatgcgacctgtacgtcagacacgttctgattgctaacttgccagtgtttctctttggggaatcctgggatggctctagccgttccgcagacgggatcgatttcatgattttttttgtttcgttgcatagggtttggtttgcccttttcctttatttcaatatatgccgtgcacttgtttgtcgggtcatcttttcatgcttttttttgtcttggttgtgatgatgtggtctggttgggcggtcgttctagatcggagtagaattctgtttcaaactacctggtggatttattaattttggatctgtatgtgtgtgccatacatattcatagttacgaattgaagatgatggatggaaatatcgatctaggataggtatacatgttgatgcgggttttactgatgcatatacagagatgctttttgttcgcttggttgtgatgatgtggtgtggttgggcggtcgttcattcgttctagatcggagtagaatactgtttcaaactacctggtgtatttattaattttggaactgtatgtgtgtgtcatacatcttcatagttacgagtttaagatggatggaaatatcgatctaggataggtatacatgttgatgtgggttttactgatgcatatacatgatggcatatgcagcatctattcatatgctctaaccttgagtacctatctattataataaacaagtatgttttataattattttgatcttgatatacttggatgatggcatatgcagcagctatatgtggatttttttagcactgccttcatacgctatttatttgcttggtactgtttcttttgtcgatgctcaccctgttgtttggtgttacttctgcaggtcgactttaacttagcctaggatccatggccactgtgaacaactggctcgctttctccctctccccgcaggagctgccgccctcccagacgacggactccacactcatctcggccgccaccgccgaccatgtctccggcgatgtctgcttcaacatcccccaagattggagcatgaggggatcagagctttcggcgctcgtcgcggagccgaagctggaggacttcctcggcggcatctccttctccgagcagcatcacaaggccaactgcaacatgatacccagcactagcagcacagtttgctacgcgagctcaggtgctagcaccggctaccatcaccagctgtaccaccagcccaccagctcagcgctccacttcgcggactccgtaatggtggcttcctcggccggtgtccacgacggcggtgccatgctcagcgcggccgccgctaacggtgtcgctggcgctgccagtgccaacggcggcggcatcgggctgtccatgattaagaactggctgcggagccaaccggcgcccatgcagccgagggtggcggcggctgagggcgcgcaggggctctctttgtccatgaacatggcggggacgacccaaggcgctgctggcatgccacttctcgctggagagcgcgcacgggcgcccgagagtgtatcgacgtcagcacagggtggagccgtcgtcgtcacggcgccgaaggaggatagcggtggcagcggtgttgccggcgctctagtagccgtgagcacggacacgggtggcagcggcggcgcgtcggctgacaacacggcaaggaagacggtggacacgttcgggcagcgcacgtcgatttaccgtggcgtgacaaggcatagatggactgggagatatgaggcacatctttgggataacagttgcagaagggaagggcaaactcgtaagggtcgtcaagtctatttaggtggctatgataaagaggagaaagctgctagggcttatgatcttgctgctctgaagtactggggtgccacaacaacaacaaattttccagtgagtaactacgaaaaggagctcgaggacatgaagcacatgacaaggcaggagtttgtagcgtctctgagaaggaagagcagtggtttctccagaggtgcatccatttacaggggagtgactaggcatcaccaacatggaagatggcaagcacggattggacgagttgcagggaacaaggatctttacttgggcaccttcagcacccaggaggaggcagcggaggcgtacgacatcgcggcgatcaagttccgcggcctcaacgccgtcaccaacttcgacatgagccgctacgacgtgaagagcatcctggacagcagcgccctccccatcggcagcgccgccaagcgcctcaaggaggccgaggccgcagcgtccgcgcagcaccaccacgccggcgtggtgagctacgacgtcggccgcatcgcctcgcagctcggcgacggcggagccctggcggcggcgtacggcgcgcactaccacggcgccgcctggccgaccatcgcgttccagccgggcgccgccagcacaggcctgtaccacccgtacgcgcagcagccaatgcgcggcggcgggtggtgcaagcaggagcaggaccacgcggtgatcgcggccgcgcacagcctgcaggacctccaccacctgaacctgggcgcggccggcgcgcacgactttttctcggcagggcagcaggccgccgccgctgcgatgcacggcctgggtagcatcgacagtgcgtcgctcgagcacagcaccggctccaactccgtcgtctacaacggcggggtcggcgacagcaacggcgccagcgccgtcggcggcagtggcggtggctacatgatgccgatgagcgctgccggagcaaccactacatcggcaatggtgagccacgagcaggtgcatgcacgggcctacgacgaagccaagcaggctgctcagatggggtacgagagctacctggtgaacgcggagaacaatggtggcggaaggatgtctgcatgggggactgtcgtgtctgcagccgcggcggcagcagcaagcagcaacgacaacatggccgccgacgtcgggcatggcggcgcgcagctcttcagtgtctggaacgacacttaagcgtacctagtggtacctgacatcttatagtctgcaacctctcgtgtctgaattcctatctttatcaagtgttattgcttccacgactataggacagctttcgtcgaaagcttttgctcatgtgatctcgaaggattcatctagtctgatttttcgtgacttgtatcggttttattggattcatccaacatatatcaataaaaaatgagttgtgtttcctttcttcctagttcagttaaaattatttccctcctgcgcttgtgctgtaattgtctgtgtacctgttgtttgtgactgtgttagttcccttggatatgatttcgtatttgatatgtacatggagatagcttagcttcattattggagtatgaagttagtatgacatagtcactctcctggaaaattgacactgcaaaccatatttttattctgaaccacaaatcctagtcagtccgctggcatatgccgtccgtttgctgaatccagaacgtgggtttggagatgtacggctgagatgcctctatgcgaaggggatttcgtggtgaaacgagatgggagtagagcaacgcccgtggaagatgcttcaaacttccacacttttgagcaacgatcggcagtagtaaggtagacgatttcaagatcaaagcatatgaagataaacaacatcaacaacaaaatttgttggggttctatagagagaaacagagctacatacatacactgttttgtatctaccatctgagatgatgaaaagatgaaaaactaaagaatgccccggcgccaacgccaggacacgccgcgcgcgcgtcacccgagccatctcttgacccagccggcgctgtatatttacacacgttgcagcatcgatcaccacctgttcgatcgcgtcgccgtcaccggcgcgccgcgacttattgaactagtctagggcgcggctaacaacctagcttagattgccttgtctaaacccttaggctaacgcgccactctagaaggccgatctcccccgaacgcgccagatccgatatcgatgggccctggccgaagcttggtcacccggtccgggcctagaaggccgatctcccgggcacccagctttcttgtacaaagtggccgttaacggatcggccagaatggcccggaccgggttaccccgcggttcaaagccaatgactgttgttaggtccagtttctaaggacgaatcatccaatcactggttctttctgaacaaaacaaagagctatagagttacgttactgtagccgagacagagcctgcaatctggttatgccacatactaggttctttcttaaagttgactcactctatcctaagttctacttacaaggagctacaacaaattggtcataaccggagagcgttcaaggaggtaatatcccatcttactctgtagcaaggctacaaaaggagagctaaagaactaggctacaaaaagagagctaaagaactaactatctagcaagactacagagctatagtgtagagatttcataaccggtgagcgttcaaggatactttgaagagaagaggtaatatctcaactagcaagactacaaaaaaatggagatataaaactaactgtctaacaagactacagagctatagtagagatagatacgttcgacacttaagcatgagaattcgagctcggtaccctggttcacaaactcaatacaacacacagtggagtagggtattacgctccggcggcccgaaccactctaaatccttgtgtcctcgtgtgctcttccaccattaatgactgtaattgcagggacacgaagagttgtagcgcttttgccaacaagatccgctatatgctagtagagtggaacctgcacagcaacaagcatccaataatctgagaataagaattatgtgtggtgatggttctcatctctgcaactcgccattttcgcgagagaaccaaatccaagttggtgaagatcatgatttgggctcatgggctggcatagtagctattacctttgcaattgtggttcgaatctatccgatattctccttttcagggagagctaatgcttatgcttattgggtattttggtttgacactgcttcacgcccaaaaaaaggcaactatgtctgagttggatatggcccaaaaaaaggcagctatgtctgagttggatatggaagtcttctttcgtttagggtgaagtaagaccaagctcatgagcttattatcttaggtcggaacaaattagttgataggcatggcacatttatcaaattataatgattttaacagaaaagcaacacctctttttcagcagcaccagctttgcaagctgcaattgacactccaagcatagtatttgctccaaactcagcctgcatttcgcacaatatcatatctatttccatttggataaaatatattttccagaaatatgggaacagaatcaagatacagaaaaaagttgtggtagtagtggtaagtggaaacacaagtacagtgaaaagatagcattatttctgaacagtcaaattaaccgaaataagtagtatcacatactgcccctaaattgactacacccaatgtaaagaattgcttgagcatattgagccatcagttgtttgtttgtgtaacggatttgacaatgcagagttcaggagcaaaaaaccgcaaaggagagaaagagggaaaggatctcctagtatcccaccttgtggcgcgccctgtcaagtgcatgatggcctggtcgatctgcgtctgctgctgcggttccatcccaacgagtgcctccgacaccttgtcgttgatcacccgcaccgcgtaggcgacccccctggcgaggaacttccgcctctcggaggccccggccgcgtcggcggcggcgccctcgagcgcgcccacgctagccgtagatgctcggtgcacggccttgttggtgtgcaactcgacctcaacggccggtgcgctacgcccgtcaaggatctggcgcgcccgcaccctcgtgatcacggtgggcgcctcccgcctcatgtggccgacgatgaaaagcgccgggttaggggccttggcgcgcaccgccgtattcagggcctcctcgctcttgcgcgagagcaggtgcttccccaggtactcctgcactgacaaggctgccacagcggtggaatttgtcctcacgacttcgccacgtcgtcctcacctccctggcttcccacgactccgccgtatcgaggtgctcggtgggtcgtcttaatccgaagtccgaactaggaagacgagacagagaggtctgaggaatgggcctcgtttgatgttgagctgaattatttttccagcataagcccaggtcttggtccatgaacaaaattactagaaacccagcccagtactacgatctaaaagagggactgccactggatagctctctctagcattctccacgctccaatacagcggcgtcgtgtctatccgggtctatccgcgaacacgtgagaactctccagaaactgctttctcctccacttcatctctctcgctttccctctataaaaagaccccttctaggaattgagggagacagcaagcaccaagcagcgatccgaagctcaatcaattcactcaaacctcttccccaaatcttcgattagatcttcgttgacaagaagactagaaccgaacctgacatgtccaacctgctcacggttcaccagaaccttccggctcttccagtggacgcgacgtccgatgaagtcaggaagaacctcatggacatgttccgcgacaggcaagcgttcagcgagcacacctggaagatgctgctctccgtctgccgctcctgggctgcatggtgcaagctgaacaacaggaagtggttccccgctgagcccgaggacgtgagggattaccttctgtacctgcaagcgcgaggtttgtttctgcttctacctttgatatatatataataattatcattaattagtagtaatataatatttcaaatatttttttcaaaataaaagaatgtagtatatagcaattgcttttctgtagtttataagtgtgtatattttaatttataacttttctaatatatgaccaaaacatggtgatgcctaggtctggcagtgaagaccatccagcaacaccttggacaactgaacatgcttcacaggcgctccggcctcccgcgccccagcgactcgaacgccgtgagcctcgtcatgcgccgcatcaggaaggaaaacgtcgatgccggcgaaagggcaaagcaggccctcgcgttcgagaggaccgatttcgaccaggtccgcagcctgatggagaacagcgacaggtgccaggacattaggaacctggcgttcctcggaattgcatacaacacgctcctcaggatcgcggaaattgcccgcattcgcgtgaaggacattagccgcaccgacggcggcaggatgcttatccacattggcaggaccaagacgctcgtttccaccgcaggcgtcgaaaaggccctcagcctcggagtgaccaagctcgtcgaacgctggatctccgtgtccggcgtcgcggacgacccaaacaactacctcttctgccgcgtccgcaagaacggggtggctgcccctagcgccaccagccaactcagcacgagggccttggaaggtattttcgaggccacccaccgcctgatctacggcgcgaaggatgacagcggtcaacgctacctcgcatggtccgggcactccgcccgcgttggagctgctagggacatggcccgcgccggtgtttccatccccgaaatcatgcaggcgggtggatggacgaacgtgaacattgtcatgaactacattcgcaaccttgacagcgagacgggcgcaatggttcgcctcctggaagatggtgactgaggtacccaacctagacttgtccatcttctggattggccaacttaattaatgtatgaaataaaaggatgcacacatagtgacatgctaatcactataatgtgggcatcaaagttgtgtgttatgtgtaattactagttatctgaataaaagagaaagagatcatccatatttcttatcctaaatgaatgtcacgtgtctttataattctttgatgaaccagatgcatttcattaaccaaatccatatacatataaatattaatcatatataattaatatcaattgggttagcaaaacaaatctagtctaggtgtgttttgcgatccgatatcgaattggccacggtaccagctgctgctgttctagggttcacaagtctgcctatttgtcttccccaatggagctatggttgtctggtctggtccttggtcgtgtcccgtttcattgtgtactatttacctgtaatgtgtatccttaagtctggtttgatggtgtctgaaacgttttgctgtggtagagcagcatggaagaactataatgaataagtgatccctaatcattgtgtccaaattttgcttctgctatacccttttgtgctgtttcttatgttttgcttaaaaatttgatctgacaaacaaatttgtctaaattatgctcttgttctgactgtgtactgtacacatttgtattgctaccggtttggcacatagttttctctttgattgcagatcaaacccttctgattgcagattgcttggctatggctgatgtgctcactgttcttctttagcttgtatattgctgatggtggcttggctacggctgaaaaagttgctgctgcgccgacttggcaactgttgctccagtaatgctttgtcctctcttcctagccgccgacttggcacttggcagctgttgctcctgtaatgcgttgttatctcttatctcttgagatgtactatgattttgaggctgtttgacttgtgccagattgccagtgctgatgctatattatctcaggtttttatgctagtatatgttttactgtgtgctgcctgtgtcgagttacgtaatctattgaaccgctatgcgtgttgatgccctgttgttgcttgccagattgatgcccctgttgcttgcagcttgcaagctgtagtgaaatcctaaaattccaaaccaaatctattctgaacttttgaagatctgtgatgtccggaagaaaagattcaaacagataaacgggactctccagaatctataaaataaatgatcgacaaacgctttgctttggtaggcttcaagcttggtcacccggtccgggcctagaaggccagcttcggccgccccgggcaactttattatacaaagttgatagataaatcagatatctggttcctaaggacccggcggaccgattaaactgattcggtccgacgcgttacctaataacttcgtatagcatacattatacgaagttattagctaactaactagtaagcttaagccatgggtcgacggatccgttaactagcgtggcatttggcaccgccgcacactatgcgagctaggagtgctagtttacagatgaaactatgaaaccaagaaaacacaattgtccgtagctagcgcgtggcgtcgtgtcaagcttcacacagtatcttcgttcttcactataaatcgcgcctgttgttcgtgagacccaccaccgtggataacagtcccctaataataagcgatcaacagcactgctgatggctgaacaccgaggcgccgccgcgcgtaaccatccgccggagcagcccgtcgtgccggcgaacgacgccttccccgaccgcgcccagcagctctgcctcgacgccgggcgcgcgctcgcgatgtgcggcgtgctcgtcgccgtccctcccgcattttacgcgtcgacgtcgcggacgacaccgcacttgccttcgtcggcttcgtcctctggatcatcggtgcgtggctgtgcctcctggcgctcacgcccttggctccacgggcggtgagggcgggcggggccgccgccagcaccttgctgatcaggtgcctgtccctttcatgaactactagcgcccgcgcccgcggccgccgggcacaagagaacacatcgatgttcgctgcgtacgtcagcaataaggcactctttgtcagtagtcgagtgcatatgttgggtgtttgccctgggagatttcaagtgttgtggccattatcccgcaggataaaaaatcggcggcttttggattgatacggaaaataacgatgtttcatgctcgtgttgtgtgtgtgacatcttgtcagccaagtttttaaccgttgctactccccctctgtgggctcagtgtgtggaccggaatacgtcgtacataggccgtagcctaagcccaatatgccgtttttcaggttggcctgtgtgacgacaagcgggtctcaaaagcccatcacgcaactggcctgcaattattggaggagagcgcgtcgagttggttccagaggctgcgtggtggggccggactctgcgacgacctctcgttcgcgtccgatttggttgccgtgagccgtgacgtaacgcctccttccgttcctccctatataagttccacccccgggtccggtttccccaagccccagtgacccccgatcccgatcgcgaaatctccgcacccgccggcaagggaccgaagcaagcctctctcccgaccgtcgcatcaaggtacgcgtccgctcgatctgtcctcttccttctcgatttgacttgctgtggtgcccgatcacgggatcagaatcgcaccagtgtagatttcgcatgttctaagatgtgttagtttccaggctaatccagttctcttgacgcccgatccgatcgagctccgtgtttatttcagcctaatcgtagtattcccctaaaatttcctcattagggggttcgcaagattgttggtcgacaggttcacttatgctcgatcgcttacttttagtcgattcatgctgcgtactattgttgccccccgtggttttatcttttctcgtgtgaaatccagtagatatagtagatatcgtagcattaggttttaattcaatcgattgattattgtatcatcaaaattgagaagttcgaatcatgcctatcatgctgcctcaaccgaaatcctgtatattgaagtttcaattcaattgattgatcattcattagattcaaccaaaatctagaaggttagatgacgcatgtcatgctgcctgcgtagtttacctttgatctgtttatgattaccttatcagtaggatatttgtgattttgggaagtagcactaactgattcatgctgacatgatgttccctttcagattatactgttgagtcctatctaattgatgctttgtatgctatatgaatacgtcatggtaaattagcagttaattagcatattagcaattgggcgtacctcatcaggattgctcttgtagatgtgtgtggtgatgtttcttgttcaattcatgttctgctttaaaagtatgtgttctctgtttgttaattaagattcatggttataatgatttggacctaattaatcagggttgcccttttagatgcgtggttacttgttgagttcatttttttcctgctatagttgtatgcgtttgttcattcatggttagatttgatttgtttcttctctattccatgccttccatatacttcaattgtagcttaacatgagatttctgtatatgcaggtcgaccgccggggatccacacgacaccatggcccagtccaagcacggcctgaccaaggagatgaccatgaagtaccgcatggagggctgcgtggacggccacaagttcgtgatcaccggcgagggcatcggctaccccttcaagggcaagcaggccatcaacctgtgcgtggtggagggcggccccttgcccttcgccgaggacatcttgtccgccgccttcatgtacggcaaccgcgtgttcaccgagtacccccaggacatcgtcgactacttcaagaactcctgccccgccggctacacctgggaccgctccttcctgttcgaggacggcgccgtgtgcatctgcaacgccgacatcaccgtgagcgtggaggagaactgcatgtaccacgagtccaagttctacggcgtgaacttccccgccgacggccccgtgatgaagaagatgaccgacaactgggagccctcctgcgagaagatcatccccgtgcccaagcagggcatcttgaagggcgacgtgagcatgtacctgctgctgaaggacggtggccgcttgcgctgccagttcgacaccgtgtacaaggccaagtccgtgccccgcaagatgcccgactggcacttcatccagcacaagctgacccgcgaggaccgcagcgacgccaagaaccagaagtggcacctgaccgagcacgccatcgcctccggctccgccttgccctccggactcagatctcgatagagtcaacctagacttgtccatcttctggattggccaacttaattaatgtatgaaataaaaggatgcacacatagtgacatgctaatcactataatgtgggcatcaaagttgtgtgttatgtgtaattactagttatctgaataaaagagaaagagatcatccatatttcttatcctaaatgaatgtcacgtgtctttataattctttgatgaaccagatgcatttcattaaccaaatccatatacatataaatattaatcatatataattaatatcaattgggttagcaaaacaaatctagtctaggtgtgttttgcgaattgcggcgcccttactttaacgcctctaaccaacacccctttatctttataaggaacaataaacagaatttgccccactgttctaaatcacctaataatatccccagctaaaaacaataaaggtttcctagaattaagacaagcatgactgttcctccaggagggtttggaacattgttgcagtcttgcagatacgggcgaagggtgagaaacagagcggagggctggaggtgacctcggtagtcgacgccggagttgagcttgacaacgacggggcggcccctgatggacttgaggaagtccgatggcgtcttcaccgtcccgccggcgcccgaggcgggcctgtcgctgccgccgccgccgctgctcatcttgcgcgctgtgcccccggcggtgtccctgtgttgcggatcgcgggtgggccaggtggatgcgagggcgacccgtttggactccggccggagccgccggatccctggtcggtgtcagtgccgtttactctgggccccacgtgtcagtaccgtctgtagatgacaacaacccgtcgtccacagtcatgtccaaaatatcctttcttcttttttttcgattcggatatctatcttccttttttttttccaaaaatcttcttgacgcaccagcgcgcacgtttgtggtaaacgccgacacgtcggtcccacgtcgatagaccccacccaccagtgagtagcgtgtacgtattcgggggtgacggacgtgtcgccgtcgtcttgctagtcccattcccatctgagccacacatctctgaacaaaaaaaaggagggaggcctccacgcacatccccctccgtgccacccgccccaaaccctcgcgccgcctccgagacagccgccgcaaccatggccaccgccgccgccgcgtctaccgcgctcactggcgccactaccgctgcgcccaaggcgaggcgccgggcgcacctcctggccacccgccgcgccctcgccgcgcccatcaggtgctcagcggcgtcacccgccatgccgatggctcccccggccaccccgctccggccgtggggccccaccgagccccgcaagggtgctgacatcctcgtcgagtccctcgagcgctgcggcgtccgcgacgtcttcgcctaccccggcggcgcgtccatggagatccaccaggcactcacccgctcccccgtcatcgccaaccacctcttccgccacgagcaaggggaggcctttgccgcctccggctacgcgcgctcctcgggccgcgtcggcgtctgcatcgccacctccggccccggcgccaccaacctagtctccgcgctcgccgacgcgctgctcgattccgtccccatggtcgccatcacgggacaggtggcgcgacgcatgattggcaccgacgccttccaggagacgcccatcgtcgaggtcacccgctccatcaccaagcacaactacctggtcctcgacgtcgacgacatcccccgcgtcgtgcaggaggctttcttcctcgcctcctctggtcgaccagggccggtgcttgtcgacatccccaaggacatccagcagcagatggcggtgcctgtctgggacaagcccatgagtctgcctgggtacattgcgcgccttcccaagccccctgcgactgagttgcttgagcaggtgctgcgtcttgttggtgaatcgcggcgccctgttctttatgtgggcggtggctgcgcagcatctggtgaggagttgcgacgctttgtggagctgactggaatcccggtcacaactactcttatgggcctcggcaacttccccagcgacgacccactgtctctgcgcatgctaggtatgcatgggacggtgtatgcaaattatgcagtggataaggccgatctgttgcttgcacttggtgtgcggtttgatgatcgcgtgacagggaagattgaggcttttgcaagcagggctaagattgtgcacgttgatattgatccggctgagattggcaagaacaagcagccacatgtgtccatctgtgcagatgttaagcttgctttgcagggcatgaatgctcttcttgaaggaagcacatcaaagaagagctttgactttggctcatggaacgatgagttggatcagcagaagagggaattcccccttgggtataaaacatctaatgaggagatccagccacaatatgctattcaggttcttgatgagctgacgaaaggcgaggccatcatcggcacaggtgttgggcagcaccagatgtgggcggcacagtactacacttacaagcggccaaggcagtggttgtcttcagctggtcttggggctatgggatttggtttgccggctgctgctggtgcttctgtggcaaacccaggtgtcactgttgttgacatcgatggagatggtagctttctcatgaacgttcaggagctagctatgatccgaattgagaacctcccagtgaaggtctttgtgctaaacaaccagcacctggggatggtggtgcagttggaggacaggttctataaggccaacagagcgcacacatacttgggaaacccagagaatgaaagtgagatatatccagatttcgtgacgatcgccaaagggttcaacattccagcggtccgtgtgacaaagaagaacgaagtccgcgcagcgataaagaagatgctcgagactccagggccgtacctcttggatataatcgtcccacaccaggagcatgtgttgcctatgatccctagtggtggggctttcaaggatatgatcctggatggtgatggcaggactgtgtactgactagctagtcagttaacagatctgccagatcctcggtgtacaaataacccgtcttatcctatgagacgggccggcgtcagtgtgttctggaggaatttttatgtcagagcctttttctttgtgtgcttgatgtagatgccaagggaagcttattggctgttgaagcttgatgcaaaataaattatggaactctgttttttgtttatctaataataactagcaaatatgcttccattgcattgaaactaacagccttttgtgtttccaagttttattttgtgacaatgtcatctatttcaattagttgtggaatcggaaacttgcaggactaacttggaaactccaatccctcagcatcctggactttttcctggtgtaatccatgtagatattattttaatcatcattttagttctggaggtttttccatctccggttttgctcccctttcttcaaaaaaaaaaaaaaaatgccgtaggcgccgcaacgcccacctgttgttcaaactcatgggcacgagtggctcgaagattttatacaacaattgctgtagtttcaccgttgctggtgaagaagcatttttttaaaaaaatatagtggtattcattttaattagtttagttgtgcagcgagcaaaatttggacatgctctgctcggaatctgatcgacctagacacagattagcagcagtagctttgtcatctgttccaagagttgcgatctgatagaagaaaaaaaaaccttcccttcaatgtaaaaccgaaactaacaagaaagaagcacagtgccgtttaggcaagtatggagtacgtattaagcatgtagaaggccatgcatgaaccactaacaagaaagaagcgcagtgccattcaggcaagcataagcatgtagattggcatgcatgaacaactaacagtagatcgtctctggtctgattagaagttttttgggaagccaagaaatcatgtacaactggttccatctcaaattccgtggcaaaaagaggcctaagcaacatacctcgagtagatcacattcaagcttggtcacccggtccgtcaatattctgattccgatgacttcgtaggttcctagctcaagccgctcgtgtccaagcgtcacttacgattagctaatgattacggcatctaggaccgactagtggcgcgccgactagctagctaaggtaccgagctcgaattcattccgattaatcgtggcctcttgctcttcaggatgaagagctatgtttaaacgtgcaagcgctactagacaattcagtacattaaaaacgtccgcaatgtgttattaagttgtctaagcgtcaatttgtttacaccacaatatatcctgcca

SEQ ID NO: 279 - DNA, 25839 bp, Artificial Sequence
  PHP99971
gtttacccgccaatatatcctgtcaaacactgatagtttaaactgaaggcgggaaacgacaatctgatcatgagcggagaattaagggagtcacgttatgacccccgccgatgacgcgggacaagccgttttacgtttggaactgacagaaccgcaacgttgaaggagccactcagcaagctggtacgattgtaatacgactcactatagggcgaattgagcgctgtttaaacgctcttcaactggaagagcggttacgctgtttaaacgctcttcaactggaagagcggttactaccggttcactagctagctgctaatcgagctagttaccctatgaggtgacatgaagcgctcacggttactatgacggttagcttcacgactgttggtggcagtagcgtacgacttagctatagttccggacttacccttaagcgatttaaatctgcggttaccgaattcgagctcggtacctagtacccttgtacttttggtttcacctgcatagagaaaacccacaagaatatgacagtctgatttgtcagtctcattctcaagcaacatttctctatccgttactttcatggtgaataacacaatccatcatcaatactttgtgttactcagaaactgaaagttattccgagtcttgcatatctttggacctactcgtttttctaccattattgctgattgttaagctctcgctacttgaatcggcattgttggagtgggaaggttcaaaaaattggagttatgactagttgtctctttctatgtacgatggagaaaatgaataaacaactgagaaaatggctcttgtttagttgatgatgctcttaagctttccactggttgccatatatgatttgggcatttcactttgatcttaatgggccttgtaaagcccaagactcatgattatctttagttgatgctcttaattaggtgtgggcaaataattcaaactgtatgtacccgaccaaaaccaaagcaaaaataatcgaaccaaaccgaaaatttaaaaataaccgaatgaaaactaaatcctataactgaaagaactgaaaccgaatcaaaatatttaatgtaaccaaaaatatccgaaatataattatattgtcaaaaatattaataatttctagattaaataattaaaaatacttaaaaatttatataaaatagtaaaaatactcgaaaataaccacaaatattcaaaaacaaccgaaatatcccaaaatattcaaagcaaaataaccgaatggataccaaattttaaaaccgaaaaaactggaacaaaaccaaaatcgaaccaaaatttcaaaaatcgaataaatactaaactttagaacaaaaaaaaacgataaccgaatgtatacgaaccaaagccgaattagataaccgaacgtccaggactactcttaatctttccgccacttatgatttgggctattactttgtttataatgagccttttcaagctcaagttcatgattgtccgtgagatgagaaactgacttgttggattcgaaaccctagctagtattggttaatacttaatacataaatgacctgcattgacatcatcatccaagaaaataaaaattgtatgcttgagatatttagttttcctagctaggttttctttattttagtaccgaatctttaggtgtgccacgttaatttagacccattttttcatacttaccaactgagtctagtttaatcatgactataatcgtataaaatgattcagtcgacgtcattgcgaacgtatataaaatcatccaaattgacgtcattccaaagaggtaagcatgcttatctaagagtccgagcatactaaacaagacgacattttatttgcactccaaatcaaattttgtattgcctaaagaaaaacaatcaaactcaagtttcttaaaattaatttcattcaaactaatcactttcaatatctcacatattattcatgccatttctatttgtctaaacatgatttaaaaaaaaaagtaaaatacaaagattactatgcaaaaactctataaaaaaaaattcaaatttcttatttatttgtgacatcaaattttcaaaataatttttttaattatcggttgatccggtcagtcgataaaaacataaactttcagcgaccgttaaaactttcctactaccgatttagagaaaatcttagcttgaaacgtaattgtaacctgccttcatgcaagtcgcaagatatgtcatcctaagttgtatatgttttctcaaaagatgtatttacttgagaaaatacgtttcaacgttgatggacaaccaattaagaatcaagcacctttcgtaatcaatttaggcttatcgtctaaggtatactgatttacgacagttgactagacttataaggaacaaaataatagaatagtttctaaacacttcacctaatcatagagactaagatggtaattcgtaaacgacaaagcctagtgacactgtccattgtaaaattccacatcatattagtattaaacatatacatgtagtttcctgaacacatgtagtatcaaacacacttcgtggcttcttcctcgaaacctgcggccgcgctatagttccggacttacccttaagataacttcgtatagcatacattatacgaagttatgggcccacgcgtgaagagcggttaccagagctggtcacctttgtccaccaagatggaactgtcttcggccagaatggccatctggattcagcaggcctagaaggccatttatcgctatcaactttgtatagaaaagttgggccgaattcgagctcggtacggccagaatggcccggaccgaagcttgcggccgcacactgatagtttaaacgaatgtttatttgtattaacattgattagctggaatagtttttgttctcaatccgatataaacgaatgggacctcaattctctctgattcctttattaccaaaccagccattagtgcctgtgtcttttaaaaagaacacctttgcaacttgggcaatggctgtggaaaggaattgtggtgactggtgatgatgagtaagcgctgacgcgataacgagatgccgtgacggataggcattatctccatataagggctagtttggcatccccatttttccatgagatttccaattttctaaaggaaaatgaactaattttccttgggaaaatgaggttttcaaactagccctaaaaagatcgggcaaagtttttttttccctgctcgatttggaacctgcatcgaaagtcttccagaatgaattaaagcctcgtgtttgacgctttttttaataactataggatgttcggcgtctctttatcggatgatgtagctagggttgttaataagatctagattttaggctataaaatgtaggatcgaatcggattagcgtcaaactatattcatatccattttgaactaaaatgaattaagagccctgtcctaatttattgtgaagaaacacctagatcgttattcattgccatccctagatggagctactgtttcttagatccaaaatgtacatccatggtgatatagctagtgtttctcagatccaaaatgtccaactttacaaaaaaaagtcttcatgaaaataaggccccgtttggtttcagggactaaagattagtccatccattttagtttcatttagtccctaaattaccaaacggtgaaactaaaacaaagactaaaatatttgtctctatcctccaatgtatgactaaaaataattaaaccatataaattctaccttttgtccctcctttgttttagttacactaacggcggaaaaatgataagagacattttagttcttttatgatttatttaatgtattttaaatacttttagtcggatagagactaattaaattttagtcctgactaaagcaaaccaaacgggccctgactcatgcacacggtttcctctttatccaagcttccaaaaaatacccacttccactttagattctccgagtcacagatccaacaatattgctccaaaaagaagtactcctaaatccttccagaaaaggtgagagtacatattaaacccgataataggccaataaccactgttatatctatagcctattcctgaacatcagaattagtgttataaacatgaaatgtgaaggagttattacagtgagagctaccgtcagtggtgtggtcgggtttgctagtgtatgaaaacagattagatgtgttaaaataaagtagagtgaaaattaatttaaatacaattctagttgattaagaacatctccaaacgaacgactagtaacagatttggtttatcattacatgtataattgcgtgcggattttagcacacatggaatgagaggcaaacacgggcccaggaacggcccacgggagagagaaaccctacccttcccttcgcggtggtggcatccgagacccgtccacaaccaccacagacacggtgcaacccccccccccccccccccccccccccctcttaaaagccgcctctcgccgccgcccgcaaaccctcatttttctctctcctgcgccgcgacgtccctcgccttcgccgccgaatccgagactccgatctcgggttcaccgcagcgcacagagcagccccgactcccggcccgatccgcgctctcctctccgtcgcttcaggtgttcgcctcctccagatctcttgctgtctcgcttgttacttttttgtttgcttttcggcgtccgatctggtgcgacggcgggtctgggtccatctggcggtgctacccgtgcggatctgcgccgattcggtgggaatattagtgattttgacggttctggattgacgcacgggtttgcgcacggaaatactacctttcccccctttctctgacatgcggctttcagctcaatacatgatttttcttacgtaggatttgattgattttgtatgtagatataagcgttttccggtgctaatatgcaaaattgctagttttggtcatataaaactgtcctgggaagctccgtagcttgtgtaccgtgcttgagtattggattcaagctgtttgagctgtgggatgctgcatgcttgatggtaatgaattattctattgtggtaagtcaatttttttgtgaaagtgactatgagatggtcgcaagggtttgctacaggataaggttaaaagactgccctgccctatgtactagacgagccattcataccgtgcgaactgctaaaagctgttgctcgatttatcgagtacttgcaattatatcagcctgctgttaagaaagtgtaaagcatcaattgtcttggtatggttctgtttagattctttataaactgaagattgagttgagcatgcattttgtataaattgtagagcttgaataatcattttaagagtacaactgattccctattgattctgttgtgaattacttgtcttctagcatggtgtttgtcttaaacatttctttgctacacacttttctcgttgtaatctgtaggacagtttgttctaagcttaaactgtgccattgctcattatattgtatacatccttttgatctaggttcatgattaaacctttctttgtatttgtttgtcatattgtcaacatgtgctgtaacttctgtgtattaacatgtttcttttgctgcagtccccgggggatctcgactctagaggatcgctcaggaaggccgctgagatagaggcatggcggccaatgcgggcggcggtggagcgggaggaggcagcggcagcggcagcgtggctgcgccggcggtgtgccgccccagcggctcgcggtggacgccgacgccggagcagatcaggatgctgaaggagctctactacggctgcggcatccggtcgcccagctcggagcagatccagcgcatcaccgccatgctgcggcagcacggcaagatcgagggcaagaacgtcttctactggttccagaaccacaaggcccgcgagcgccagaagcgccgcctcaccagcctcgacgtcaacgtgcccgccgccggcgcggccgacgccaccaccagccaactcggcgtcctctcgctgtcgtcgccgccgccttcaggcgcggcgcctccctcgcccaccctcggcttctacgccgccggcaatggcggcggatcggctgtgctgctggacacgagttccgactggggcagcagcggcgctgccatggccaccgagacatgcttcctgcaggactacatgggcgtgacggacacgggcagctcgtcgcagtggccacgcttctcgtcgtcggacacgataatggcggcggccgcggcgcgggcggcgacgacgcgggcgcccgagacgctccctctcttcccgacctgcggcgacgacggcggcagcggtagcagcagctacttgccgttctggggtgccgcgtccacaactgccggcgccacttcttccgttgcgatccagcagcaacaccagctgcaggagcagtacagcttttacagcaacagcaacagcacccagctggccggcaccggcaaccaagacgtatcggcaacagcagcagcagccgccgccctggagctgagcctcagctcatggtgctccccttaccctgctgcagggagtatgtgagagcaacgcgagctgccactgctcttcactgatgtctctggaatggaaggaggaggaagtgagcatagcgttggtgcgttgctgtcaagggcgaattcacatggttaacctagacttgtccatcttctggattggccaacttaattaatgtatgaaataaaaggatgcacacatagtgacatgctaatcactataatgtgggcatcaaagttgtgtgttatgtgtaattactagttatctgaataaaagagaaagagatcatccatatttcttatcctaaatgaatgtcacgtgtctttataattctttgatgaaccagatgcatttcattaaccaaatccatatacatataaatattaatcatatataattaatatcaattgggttagcaaaacaaatctagtctaggtgtgttttgcgaatgcggccgccaccgcggtggagctcgaattccggtccgggcctagaaggccagcttcaagtttgtacaaaaaagcaggctccggccagaatctcactgactagctaaacagcggccgcatcgagcagctggcttgtggggaccagacaaaaaaggaatggtgcagaattgttaggcgcacctaccaaaagcatctttgcctttattgcaaagataaagcagattcctctagtacaagtggggaacaaaataacgtggaaaagagctgtcctgacagcccactcactaatgcgtatgacgaacgcagtgacgaccacaaaactcgagcaacgagatcatgagccaatcaaagaggagtgatgtagacctaaagcaataatggagccatgacgtaagggcttacgcccatacgaaataattaaaggctgatgtgacctgtcggtctctcagaacctttactttttatgtttggcgtgtatttttaaatttccacggcaatgacgatgtgaccgtcgacccactaaaacattgctttgtcaaaagctaaaaaagatgatgcccgacagccacttgtgtgaagcatgagaagccggtccctccactaagaaaattagtgaagcatcttccagtggtccctccactcacagctcaatcagtgagcaacaggacgaaggaaatgacgtaagccatgacgtctaatcccagggcccggtgaccaatcgaattagcttggcgcgtggaccgaagcttgcatgcctgcagtgcagcgtgacccggtcgtgcccctctctagagataatgagcattgcatgtctaagttataaaaaattaccacatattttttttgtcacacttgtttgaagtgcagtttatctatctttatacatatatttaaactttactctacgaataatataatctatagtactacaataatatcagtgttttagagaatcatataaatgaacagttagacatggtctaaaggacaattgagtattttgacaacaggactctacagttttatctttttagtgtgcatgtgttctcctttttttttgcaaatagcttcacctatataatacttcatccattttattagtacatccatttagggtttagggttaatggtttttatagactaatttttttagtacatctattttattctattttagcctctaaattaagaaaactaaaactctattttagtttttttatttaataatttagatataaaatagaataaaataaagtgactaaaaattaaacaaataccctttaagaaattaaaaaaactaaggaaacatttttcttgtttcgagtagataatgccagcctgttaaacgccgtcgacgagtctaacggacaccaaccagcgaaccagcagcgtcgcgtcgggccaagcgaagcagacggcacggcatctctgtcgctgcctctggacccctctcgagagttccgctccaccgttggacttgctccgctgtcggcatccagaaattgcgtggcggagcggcagacgtgagccggcacggcaggcggcctcctcctcctctcacggcaccggcagctacgggggattcctttcccaccgctccttcgctttcccttcctcgcccgccgtaataaatagacaccccctccacaccctctttccccaacctcgtgttgttcggagcgcacacacacacaaccagatctcccccaaatccacccgtcggcacctccgcttcaaggtacgccgctcgtcctcccccccccccctctctaccttctctagatcggcgttccggtccatgcatggttagggcccggtagttctacttctgttcatgtttgtgttagatccgtgtttgtgttagatccgtgctgctagcgttcgtacacggatgcgacctgtacgtcagacacgttctgattgctaacttgccagtgtttctctttggggaatcctgggatggctctagccgttccgcagacgggatcgatttcatgattttttttgtttcgttgcatagggtttggtttgcccttttcctttatttcaatatatgccgtgcacttgtttgtcgggtcatcttttcatgcttttttttgtcttggttgtgatgatgtggtctggttgggcggtcgttctagatcggagtagaattctgtttcaaactacctggtggatttattaattttggatctgtatgtgtgtgccatacatattcatagttacgaattgaagatgatggatggaaatatcgatctaggataggtatacatgttgatgcgggttttactgatgcatatacagagatgctttttgttcgcttggttgtgatgatgtggtgtggttgggcggtcgttcattcgttctagatcggagtagaatactgtttcaaactacctggtgtatttattaattttggaactgtatgtgtgtgtcatacatcttcatagttacgagtttaagatggatggaaatatcgatctaggataggtatacatgttgatgtgggttttactgatgcatatacatgatggcatatgcagcatctattcatatgctctaaccttgagtacctatctattataataaacaagtatgttttataattattttgatcttgatatacttggatgatggcatatgcagcagctatatgtggatttttttagcactgccttcatacgctatttatttgcttggtactgtttcttttgtcgatgctcaccctgttgtttggtgttacttctgcaggtcgactttaacttagcctaggatccatggccactgtgaacaactggctcgctttctccctctccccgcaggagctgccgccctcccagacgacggactccacactcatctcggccgccaccgccgaccatgtctccggcgatgtctgcttcaacatcccccaagattggagcatgaggggatcagagctttcggcgctcgtcgcggagccgaagctggaggacttcctcggcggcatctccttctccgagcagcatcacaaggccaactgcaacatgatacccagcactagcagcacagtttgctacgcgagctcaggtgctagcaccggctaccatcaccagctgtaccaccagcccaccagctcagcgctccacttcgcggactccgtaatggtggcttcctcggccggtgtccacgacggcggtgccatgctcagcgcggccgccgctaacggtgtcgctggcgctgccagtgccaacggcggcggcatcgggctgtccatgattaagaactggctgcggagccaaccggcgcccatgcagccgagggtggcggcggctgagggcgcgcaggggctctctttgtccatgaacatggcggggacgacccaaggcgctgctggcatgccacttctcgctggagagcgcgcacgggcgcccgagagtgtatcgacgtcagcacagggtggagccgtcgtcgtcacggcgccgaaggaggatagcggtggcagcggtgttgccggcgctctagtagccgtgagcacggacacgggtggcagcggcggcgcgtcggctgacaacacggcaaggaagacggtggacacgttcgggcagcgcacgtcgatttaccgtggcgtgacaaggcatagatggactgggagatatgaggcacatctttgggataacagttgcagaagggaagggcaaactcgtaagggtcgtcaagtctatttaggtggctatgataaagaggagaaagctgctagggcttatgatcttgctgctctgaagtactggggtgccacaacaacaacaaattttccagtgagtaactacgaaaaggagctcgaggacatgaagcacatgacaaggcaggagtttgtagcgtctctgagaaggaagagcagtggtttctccagaggtgcatccatttacaggggagtgactaggcatcaccaacatggaagatggcaagcacggattggacgagttgcagggaacaaggatctttacttgggcaccttcagcacccaggaggaggcagcggaggcgtacgacatcgcggcgatcaagttccgcggcctcaacgccgtcaccaacttcgacatgagccgctacgacgtgaagagcatcctggacagcagcgccctccccatcggcagcgccgccaagcgcctcaaggaggccgaggccgcagcgtccgcgcagcaccaccacgccggcgtggtgagctacgacgtcggccgcatcgcctcgcagctcggcgacggcggagccctggcggcggcgtacggcgcgcactaccacggcgccgcctggccgaccatcgcgttccagccgggcgccgccagcacaggcctgtaccacccgtacgcgcagcagccaatgcgcggcggcgggtggtgcaagcaggagcaggaccacgcggtgatcgcggccgcgcacagcctgcaggacctccaccacctgaacctgggcgcggccggcgcgcacgactttttctcggcagggcagcaggccgccgccgctgcgatgcacggcctgggtagcatcgacagtgcgtcgctcgagcacagcaccggctccaactccgtcgtctacaacggcggggtcggcgacagcaacggcgccagcgccgtcggcggcagtggcggtggctacatgatgccgatgagcgctgccggagcaaccactacatcggcaatggtgagccacgagcaggtgcatgcacgggcctacgacgaagccaagcaggctgctcagatggggtacgagagctacctggtgaacgcggagaacaatggtggcggaaggatgtctgcatgggggactgtcgtgtctgcagccgcggcggcagcagcaagcagcaacgacaacatggccgccgacgtcgggcatggcggcgcgcagctcttcagtgtctggaacgacacttaagcgtacctagtggtacctgacatcttatagtctgcaacctctcgtgtctgaattcctatctttatcaagtgttattgcttccacgactataggacagctttcgtcgaaagcttttgctcatgtgatctcgaaggattcatctagtctgatttttcgtgacttgtatcggttttattggattcatccaacatatatcaataaaaaatgagttgtgtttcctttcttcctagttcagttaaaattatttccctcctgcgcttgtgctgtaattgtctgtgtacctgttgtttgtgactgtgttagttcccttggatatgatttcgtatttgatatgtacatggagatagcttagcttcattattggagtatgaagttagtatgacatagtcactctcctggaaaattgacactgcaaaccatatttttattctgaaccacaaatcctagtcagtccgctggcatatgccgtccgtttgctgaatccagaacgtgggtttggagatgtacggctgagatgcctctatgcgaaggggatttcgtggtgaaacgagatgggagtagagcaacgcccgtggaagatgcttcaaacttccacacttttgagcaacgatcggcagtagtaaggtagacgatttcaagatcaaagcatatgaagataaacaacatcaacaacaaaatttgttggggttctatagagagaaacagagctacatacatacactgttttgtatctaccatctgagatgatgaaaagatgaaaaactaaagaatgccccggcgccaacgccaggacacgccgcgcgcgcgtcacccgagccatctcttgacccagccggcgctgtatatttacacacgttgcagcatcgatcaccacctgttcgatcgcgtcgccgtcaccggcgcgccgcgacttattgaactagtctagggcgcggctaacaacctagcttagattgccttgtctaaacccttaggctaacgcgccactctagaaggccgatctcccccgaacgcgccagatccgatatcgatgggccctggccgaagcttggtcacccggtccgggcctagaaggccgatctcccgggcacccagctttcttgtacaaagtggccgttaacggatcggccagaatggcccggaccgggttaccccgcggttcaaagccaatgactgttgttaggtccagtttctaaggacgaatcatccaatcactggttctttctgaacaaaacaaagagctatagagttacgttactgtagccgagacagagcctgcaatctggttatgccacatactaggttctttcttaaagttgactcactctatcctaagttctacttacaaggagctacaacaaattggtcataaccggagagcgttcaaggaggtaatatcccatcttactctgtagcaaggctacaaaaggagagctaaagaactaggctacaaaaagagagctaaagaactaactatctagcaagactacagagctatagtgtagagatttcataaccggtgagcgttcaaggatactttgaagagaagaggtaatatctcaactagcaagactacaaaaaaatggagatataaaactaactgtctaacaagactacagagctatagtagagatagatacgttcgacacttaagcatgagaattcgagctcggtaccctggttcacaaactcaatacaacacacagtggagtagggtattacgctccggcggcccgaaccactctaaatccttgtgtcctcgtgtgctcttccaccattaatgactgtaattgcagggacacgaagagttgtagcgcttttgccaacaagatccgctatatgctagtagagtggaacctgcacagcaacaagcatccaataatctgagaataagaattatgtgtggtgatggttctcatctctgcaactcgccattttcgcgagagaaccaaatccaagttggtgaagatcatgatttgggctcatgggctggcatagtagctattacctttgcaattgtggttcgaatctatccgatattctccttttcagggagagctaatgcttatgcttattgggtattttggtttgacactgcttcacgcccaaaaaaaggcaactatgtctgagttggatatggcccaaaaaaaggcagctatgtctgagttggatatggaagtcttctttcgtttagggtgaagtaagaccaagctcatgagcttattatcttaggtcggaacaaattagttgataggcatggcacatttatcaaattataatgattttaacagaaaagcaacacctctttttcagcagcaccagctttgcaagctgcaattgacactccaagcatagtatttgctccaaactcagcctgcatttcgcacaatatcatatctatttccatttggataaaatatattttccagaaatatgggaacagaatcaagatacagaaaaaagttgtggtagtagtggtaagtggaaacacaagtacagtgaaaagatagcattatttctgaacagtcaaattaaccgaaataagtagtatcacatactgcccctaaattgactacacccaatgtaaagaattgcttgagcatattgagccatcagttgtttgtttgtgtaacggatttgacaatgcagagttcaggagcaaaaaaccgcaaaggagagaaagagggaaaggatctcctagtatcccaccttgtggcgcgccctgtcaagtgcatgatggcctggtcgatctgcgtctgctgctgcggttccatcccaacgagtgcctccgacaccttgtcgttgatcacccgcaccgcgtaggcgacccccctggcgaggaacttccgcctctcggaggccccggccgcgtcggcggcggcgccctcgagcgcgcccacgctagccgtagatgctcggtgcacggccttgttggtgtgcaactcgacctcaacggccggtgcgctacgcccgtcaaggatctggcgcgcccgcaccctcgtgatcacggtgggcgcctcccgcctcatgtggccgacgatgaaaagcgccgggttaggggccttggcgcgcaccgccgtattcagggcctcctcgctcttgcgcgagagcaggtgcttccccaggtactcctgcactgacaaggctgccacagcggtggaatttgtcctcacgacttcgccacgtcgtcctcacctccctggcttcccacgactccgccgtatcgaggtgctcggtgggtcgtcttaatccgaagtccgaactaggaagacgagacagagaggtctgaggaatgggcctcgtttgatgttgagctgaattatttttccagcataagcccaggtcttggtccatgaacaaaattactagaaacccagcccagtactacgatctaaaagagggactgccactggatagctctctctagcattctccacgctccaatacagcggcgtcgtgtctatccgggtctatccgcgaacacgtgagaactctccagaaactgctttctcctccacttcatctctctcgctttccctctataaaaagaccccttctaggaattgagggagacagcaagcaccaagcagcgatccgaagctcaatcaattcactcaaacctcttccccaaatcttcgattagatcttcgttgacaagaagactagaaccgaacctgacatgtccaacctgctcacggttcaccagaaccttccggctcttccagtggacgcgacgtccgatgaagtcaggaagaacctcatggacatgttccgcgacaggcaagcgttcagcgagcacacctggaagatgctgctctccgtctgccgctcctgggctgcatggtgcaagctgaacaacaggaagtggttccccgctgagcccgaggacgtgagggattaccttctgtacctgcaagcgcgaggtttgtttctgcttctacctttgatatatatataataattatcattaattagtagtaatataatatttcaaatatttttttcaaaataaaagaatgtagtatatagcaattgcttttctgtagtttataagtgtgtatattttaatttataacttttctaatatatgaccaaaacatggtgatgcctaggtctggcagtgaagaccatccagcaacaccttggacaactgaacatgcttcacaggcgctccggcctcccgcgccccagcgactcgaacgccgtgagcctcgtcatgcgccgcatcaggaaggaaaacgtcgatgccggcgaaagggcaaagcaggccctcgcgttcgagaggaccgatttcgaccaggtccgcagcctgatggagaacagcgacaggtgccaggacattaggaacctggcgttcctcggaattgcatacaacacgctcctcaggatcgcggaaattgcccgcattcgcgtgaaggacattagccgcaccgacggcggcaggatgcttatccacattggcaggaccaagacgctcgtttccaccgcaggcgtcgaaaaggccctcagcctcggagtgaccaagctcgtcgaacgctggatctccgtgtccggcgtcgcggacgacccaaacaactacctcttctgccgcgtccgcaagaacggggtggctgcccctagcgccaccagccaactcagcacgagggccttggaaggtattttcgaggccacccaccgcctgatctacggcgcgaaggatgacagcggtcaacgctacctcgcatggtccgggcactccgcccgcgttggagctgctagggacatggcccgcgccggtgtttccatccccgaaatcatgcaggcgggtggatggacgaacgtgaacattgtcatgaactacattcgcaaccttgacagcgagacgggcgcaatggttcgcctcctggaagatggtgactgaggtacccaacctagacttgtccatcttctggattggccaacttaattaatgtatgaaataaaaggatgcacacatagtgacatgctaatcactataatgtgggcatcaaagttgtgtgttatgtgtaattactagttatctgaataaaagagaaagagatcatccatatttcttatcctaaatgaatgtcacgtgtctttataattctttgatgaaccagatgcatttcattaaccaaatccatatacatataaatattaatcatatataattaatatcaattgggttagcaaaacaaatctagtctaggtgtgttttgcgatccgatatcgaattggccacggtaccagctgctgctgttctagggttcacaagtctgcctatttgtcttccccaatggagctatggttgtctggtctggtccttggtcgtgtcccgtttcattgtgtactatttacctgtaatgtgtatccttaagtctggtttgatggtgtctgaaacgttttgctgtggtagagcagcatggaagaactataatgaataagtgatccctaatcattgtgtccaaattttgcttctgctatacccttttgtgctgtttcttatgttttgcttaaaaatttgatctgacaaacaaatttgtctaaattatgctcttgttctgactgtgtactgtacacatttgtattgctaccggtttggcacatagttttctctttgattgcagatcaaacccttctgattgcagattgcttggctatggctgatgtgctcactgttcttctttagcttgtatattgctgatggtggcttggctacggctgaaaaagttgctgctgcgccgacttggcaactgttgctccagtaatgctttgtcctctcttcctagccgccgacttggcacttggcagctgttgctcctgtaatgcgttgttatctcttatctcttgagatgtactatgattttgaggctgtttgacttgtgccagattgccagtgctgatgctatattatctcaggtttttatgctagtatatgttttactgtgtgctgcctgtgtcgagttacgtaatctattgaaccgctatgcgtgttgatgccctgttgttgcttgccagattgatgcccctgttgcttgcagcttgcaagctgtagtgaaatcctaaaattccaaaccaaatctattctgaacttttgaagatctgtgatgtccggaagaaaagattcaaacagataaacgggactctccagaatctataaaataaatgatcgacaaacgctttgctttggtaggcttcaagcttggtcacccggtccgggcctagaaggccagcttcggccgccccgggcaactttattatacaaagttgatagataaatcagatatctggttcctaaggacccggcggaccgattaaactgattcggtccgacgcgttacctaataacttcgtatagcatacattatacgaagttattagctaactaactagtaagcttaagccatgggtcgacggatccgttaactagcgtggcatttggcaccgccgcacactatgcgagctaggagtgctagtttacagatgaaactatgaaaccaagaaaacacaattgtccgtagctagcgcgtggcgtcgtgtcaagcttcacacagtatcttcgttcttcactataaatcgcgcctgttgttcgtgagacccaccaccgtggataacagtcccctaataataagcgatcaacagcactgctgatggctgaacaccgaggcgccgccgcgcgtaaccatccgccggagcagcccgtcgtgccggcgaacgacgccttccccgaccgcgcccagcagctctgcctcgacgccgggcgcgcgctcgcgatgtgcggcgtgctcgtcgccgtccctcccgcattttacgcgtcgacgtcgcggacgacaccgcacttgccttcgtcggcttcgtcctctggatcatcggtgcgtggctgtgcctcctggcgctcacgcccttggctccacgggcggtgagggcgggcggggccgccgccagcaccttgctgatcaggtgcctgtccctttcatgaactactagcgcccgcgcccgcggccgccgggcacaagagaacacatcgatgttcgctgcgtacgtcagcaataaggcactctttgtcagtagtcgagtgcatatgttgggtgtttgccctgggagatttcaagtgttgtggccattatcccgcaggataaaaaatcggcggcttttggattgatacggaaaataacgatgtttcatgctcgtgttgtgtgtgtgacatcttgtcagccaagtttttaaccgttgctactccccctctgtgggctcagtgtgtggaccggaatacgtcgtacataggccgtagcctaagcccaatatgccgtttttcaggttggcctgtgtgacgacaagcgggtctcaaaagcccatcacgcaactggcctgcaattattggaggagagcgcgtcgagttggttccagaggctgcgtggtggggccggactctgcgacgacctctcgttcgcgtccgatttggttgccgtgagccgtgacgtaacgcctccttccgttcctccctatataagttccacccccgggtccggtttccccaagccccagtgacccccgatcccgatcgcgaaatctccgcacccgccggcaagggaccgaagcaagcctctctcccgaccgtcgcatcaaggtacgcgtccgctcgatctgtcctcttccttctcgatttgacttgctgtggtgcccgatcacgggatcagaatcgcaccagtgtagatttcgcatgttctaagatgtgttagtttccaggctaatccagttctcttgacgcccgatccgatcgagctccgtgtttatttcagcctaatcgtagtattcccctaaaatttcctcattagggggttcgcaagattgttggtcgacaggttcacttatgctcgatcgcttacttttagtcgattcatgctgcgtactattgttgccccccgtggttttatcttttctcgtgtgaaatccagtagatatagtagatatcgtagcattaggttttaattcaatcgattgattattgtatcatcaaaattgagaagttcgaatcatgcctatcatgctgcctcaaccgaaatcctgtatattgaagtttcaattcaattgattgatcattcattagattcaaccaaaatctagaaggttagatgacgcatgtcatgctgcctgcgtagtttacctttgatctgtttatgattaccttatcagtaggatatttgtgattttgggaagtagcactaactgattcatgctgacatgatgttccctttcagattatactgttgagtcctatctaattgatgctttgtatgctatatgaatacgtcatggtaaattagcagttaattagcatattagcaattgggcgtacctcatcaggattgctcttgtagatgtgtgtggtgatgtttcttgttcaattcatgttctgctttaaaagtatgtgttctctgtttgttaattaagattcatggttataatgatttggacctaattaatcagggttgcccttttagatgcgtggttacttgttgagttcatttttttcctgctatagttgtatgcgtttgttcattcatggttagatttgatttgtttcttctctattccatgccttccatatacttcaattgtagcttaacatgagatttctgtatatgcaggtcgaccgccggggatccacacgacaccatggcccagtccaagcacggcctgaccaaggagatgaccatgaagtaccgcatggagggctgcgtggacggccacaagttcgtgatcaccggcgagggcatcggctaccccttcaagggcaagcaggccatcaacctgtgcgtggtggagggcggccccttgcccttcgccgaggacatcttgtccgccgccttcatgtacggcaaccgcgtgttcaccgagtacccccaggacatcgtcgactacttcaagaactcctgccccgccggctacacctgggaccgctccttcctgttcgaggacggcgccgtgtgcatctgcaacgccgacatcaccgtgagcgtggaggagaactgcatgtaccacgagtccaagttctacggcgtgaacttccccgccgacggccccgtgatgaagaagatgaccgacaactgggagccctcctgcgagaagatcatccccgtgcccaagcagggcatcttgaagggcgacgtgagcatgtacctgctgctgaaggacggtggccgcttgcgctgccagttcgacaccgtgtacaaggccaagtccgtgccccgcaagatgcccgactggcacttcatccagcacaagctgacccgcgaggaccgcagcgacgccaagaaccagaagtggcacctgaccgagcacgccatcgcctccggctccgccttgccctccggactcagatctcgatagagtcaacctagacttgtccatcttctggattggccaacttaattaatgtatgaaataaaaggatgcacacatagtgacatgctaatcactataatgtgggcatcaaagttgtgtgttatgtgtaattactagttatctgaataaaagagaaagagatcatccatatttcttatcctaaatgaatgtcacgtgtctttataattctttgatgaaccagatgcatttcattaaccaaatccatatacatataaatattaatcatatataattaatatcaattgggttagcaaaacaaatctagtctaggtgtgttttgcgaattgcggcgcccttactttaacgcctctaaccaacacccctttatctttataaggaacaataaacagaatttgccccactgttctaaatcacctaataatatccccagctaaaaacaataaaggtttcctagaattaagacaagcatgactgttcctccaggagggtttggaacattgttgcagtcttgcagatacgggcgaagggtgagaaacagagcggagggctggaggtgacctcggtagtcgacgccggagttgagcttgacaacgacggggcggcccctgatggacttgaggaagtccgatggcgtcttcaccgtcccgccggcgcccgaggcgggcctgtcgctgccgccgccgccgctgctcatcttgcgcgctgtgcccccggcggtgtccctgtgttgcggatcgcgggtgggccaggtggatgcgagggcgacccgtttggactccggccggagccgccggatccctggtcggtgtcagtgccgtttactctgggccccacgtgtcagtaccgtctgtagatgacaacaacccgtcgtccacagtcatgtccaaaatatcctttcttcttttttttcgattcggatatctatcttccttttttttttccaaaaatcttcttgacgcaccagcgcgcacgtttgtggtaaacgccgacacgtcggtcccacgtcgatagaccccacccaccagtgagtagcgtgtacgtattcgggggtgacggacgtgtcgccgtcgtcttgctagtcccattcccatctgagccacacatctctgaacaaaaaaaaggagggaggcctccacgcacatccccctccgtgccacccgccccaaaccctcgcgccgcctccgagacagccgccgcaaccatggccaccgccgccgccgcgtctaccgcgctcactggcgccactaccgctgcgcccaaggcgaggcgccgggcgcacctcctggccacccgccgcgccctcgccgcgcccatcaggtgctcagcggcgtcacccgccatgccgatggctcccccggccaccccgctccggccgtggggccccaccgagccccgcaagggtgctgacatcctcgtcgagtccctcgagcgctgcggcgtccgcgacgtcttcgcctaccccggcggcgcgtccatggagatccaccaggcactcacccgctcccccgtcatcgccaaccacctcttccgccacgagcaaggggaggcctttgccgcctccggctacgcgcgctcctcgggccgcgtcggcgtctgcatcgccacctccggccccggcgccaccaacctagtctccgcgctcgccgacgcgctgctcgattccgtccccatggtcgccatcacgggacaggtggcgcgacgcatgattggcaccgacgccttccaggagacgcccatcgtcgaggtcacccgctccatcaccaagcacaactacctggtcctcgacgtcgacgacatcccccgcgtcgtgcaggaggctttcttcctcgcctcctctggtcgaccagggccggtgcttgtcgacatccccaaggacatccagcagcagatggcggtgcctgtctgggacaagcccatgagtctgcctgggtacattgcgcgccttcccaagccccctgcgactgagttgcttgagcaggtgctgcgtcttgttggtgaatcgcggcgccctgttctttatgtgggcggtggctgcgcagcatctggtgaggagttgcgacgctttgtggagctgactggaatcccggtcacaactactcttatgggcctcggcaacttccccagcgacgacccactgtctctgcgcatgctaggtatgcatgggacggtgtatgcaaattatgcagtggataaggccgatctgttgcttgcacttggtgtgcggtttgatgatcgcgtgacagggaagattgaggcttttgcaagcagggctaagattgtgcacgttgatattgatccggctgagattggcaagaacaagcagccacatgtgtccatctgtgcagatgttaagcttgctttgcagggcatgaatgctcttcttgaaggaagcacatcaaagaagagctttgactttggctcatggaacgatgagttggatcagcagaagagggaattcccccttgggtataaaacatctaatgaggagatccagccacaatatgctattcaggttcttgatgagctgacgaaaggcgaggccatcatcggcacaggtgttgggcagcaccagatgtgggcggcacagtactacacttacaagcggccaaggcagtggttgtcttcagctggtcttggggctatgggatttggtttgccggctgctgctggtgcttctgtggcaaacccaggtgtcactgttgttgacatcgatggagatggtagctttctcatgaacgttcaggagctagctatgatccgaattgagaacctcccagtgaaggtctttgtgctaaacaaccagcacctggggatggtggtgcagttggaggacaggttctataaggccaacagagcgcacacatacttgggaaacccagagaatgaaagtgagatatatccagatttcgtgacgatcgccaaagggttcaacattccagcggtccgtgtgacaaagaagaacgaagtccgcgcagcgataaagaagatgctcgagactccagggccgtacctcttggatataatcgtcccacaccaggagcatgtgttgcctatgatccctagtggtggggctttcaaggatatgatcctggatggtgatggcaggactgtgtactgactagctagtcagttaacagatctgccagatcctcggtgtacaaataacccgtcttatcctatgagacgggccggcgtcagtgtgttctggaggaatttttatgtcagagcctttttctttgtgtgcttgatgtagatgccaagggaagcttattggctgttgaagcttgatgcaaaataaattatggaactctgttttttgtttatctaataataactagcaaatatgcttccattgcattgaaactaacagccttttgtgtttccaagttttattttgtgacaatgtcatctatttcaattagttgtggaatcggaaacttgcaggactaacttggaaactccaatccctcagcatcctggactttttcctggtgtaatccatgtagatattattttaatcatcattttagttctggaggtttttccatctccggttttgctcccctttcttcaaaaaaaaaaaaaaaatgccgtaggcgccgcaacgcccacctgttgttcaaactcatgggcacgagtggctcgaagattttatacaacaattgctgtagtttcaccgttgctggtgaagaagcatttttttaaaaaaatatagtggtattcattttaattagtttagttgtgcagcgagcaaaatttggacatgctctgctcggaatctgatcgacctagacacagattagcagcagtagctttgtcatctgttccaagagttgcgatctgatagaagaaaaaaaaaccttcccttcaatgtaaaaccgaaactaacaagaaagaagcacagtgccgtttaggcaagtatggagtacgtattaagcatgtagaaggccatgcatgaaccactaacaagaaagaagcgcagtgccattcaggcaagcataagcatgtagattggcatgcatgaacaactaacagtagatcgtctctggtctgattagaagttttttgggaagccaagaaatcatgtacaactggttccatctcaaattccgtggcaaaaagaggcctaagcaacatacctcgagtagatcacattcaagcttggtcacccggtccgtcaatattctgattccgatgacttcgtaggttcctagctcaagccgctcgtgtccaagcgtcacttacgattagctaatgattacggcatctaggaccgactagtggcgcgccgactagctagctaaggtaccgagctcgaattcattccgattaatcgtggcctcttgctcttcaggatgaagagctatgtttaaacgtgcaagcgctactagacaattcagtacattaaaaacgtccgcaatgtgttattaagttgtctaagcgtcaatttgtttacaccacaatatatcctgcca

SEQ ID NO: 280 - DNA, 24653 bp, Artificial Sequence
  PHP99809
gtttacccgccaatatatcctgtcaaacactgatagtttaaactgaaggcgggaaacgacaatctgatcatgagcggagaattaagggagtcacgttatgacccccgccgatgacgcgggacaagccgttttacgtttggaactgacagaaccgcaacgttgaaggagccactcagcaagctggtacgattgtaatacgactcactatagggcgaattgagcgctgtttaaacgctcttcaactggaagagcggttacgctgtttaaacgctcttcaactggaagagcggttactaccggttcactagctagctgctaatcgagctagttaccctatgaggtgacatgaagcgctcacggttactatgacggttagcttcacgactgttggtggcagtagcgtacgacttagctatagttccggacttacccttaagcgatttaaatctgcggttaccgaattcgagctcggtacctagtacccttgtacttttggtttcacctgcatagagaaaacccacaagaatatgacagtctgatttgtcagtctcattctcaagcaacatttctctatccgttactttcatggtgaataacacaatccatcatcaatactttgtgttactcagaaactgaaagttattccgagtcttgcatatctttggacctactcgtttttctaccattattgctgattgttaagctctcgctacttgaatcggcattgttggagtgggaaggttcaaaaaattggagttatgactagttgtctctttctatgtacgatggagaaaatgaataaacaactgagaaaatggctcttgtttagttgatgatgctcttaagctttccactggttgccatatatgatttgggcatttcactttgatcttaatgggccttgtaaagcccaagactcatgattatctttagttgatgctcttaattaggtgtgggcaaataattcaaactgtatgtacccgaccaaaaccaaagcaaaaataatcgaaccaaaccgaaaatttaaaaataaccgaatgaaaactaaatcctataactgaaagaactgaaaccgaatcaaaatatttaatgtaaccaaaaatatccgaaatataattatattgtcaaaaatattaataatttctagattaaataattaaaaatacttaaaaatttatataaaatagtaaaaatactcgaaaataaccacaaatattcaaaaacaaccgaaatatcccaaaatattcaaagcaaaataaccgaatggataccaaattttaaaaccgaaaaaactggaacaaaaccaaaatcgaaccaaaatttcaaaaatcgaataaatactaaactttagaacaaaaaaaaacgataaccgaatgtatacgaaccaaagccgaattagataaccgaacgtccaggactactcttaatctttccgccacttatgatttgggctattactttgtttataatgagccttttcaagctcaagttcatgattgtccgtgagatgagaaactgacttgttggattcgaaaccctagctagtattggttaatacttaatacataaatgacctgcattgacatcatcatccaagaaaataaaaattgtatgcttgagatatttagttttcctagctaggttttctttattttagtaccgaatctttaggtgtgccacgttaatttagacccattttttcatacttaccaactgagtctagtttaatcatgactataatcgtataaaatgattcagtcgacgtcattgcgaacgtatataaaatcatccaaattgacgtcattccaaagaggtaagcatgcttatctaagagtccgagcatactaaacaagacgacattttatttgcactccaaatcaaattttgtattgcctaaagaaaaacaatcaaactcaagtttcttaaaattaatttcattcaaactaatcactttcaatatctcacatattattcatgccatttctatttgtctaaacatgatttaaaaaaaaaagtaaaatacaaagattactatgcaaaaactctataaaaaaaaattcaaatttcttatttatttgtgacatcaaattttcaaaataatttttttaattatcggttgatccggtcagtcgataaaaacataaactttcagcgaccgttaaaactttcctactaccgatttagagaaaatcttagcttgaaacgtaattgtaacctgccttcatgcaagtcgcaagatatgtcatcctaagttgtatatgttttctcaaaagatgtatttacttgagaaaatacgtttcaacgttgatggacaaccaattaagaatcaagcacctttcgtaatcaatttaggcttatcgtctaaggtatactgatttacgacagttgactagacttataaggaacaaaataatagaatagtttctaaacacttcacctaatcatagagactaagatggtaattcgtaaacgacaaagcctagtgacactgtccattgtaaaattccacatcatattagtattaaacatatacatgtagtttcctgaacacatgtagtatcaaacacacttcgtggcttcttcctcgaaacctgcggccgcgctatagttccggacttacccttaagataacttcgtatagcatacattatacgaagttatgggcccacgcgtgaagagcggttaccagagctggtcacctttgtccaccaagatggaactgtcttcggccagaatggccatctggattcagcaggcctagaaggccatttatcgctatcaactttgtatagaaaagttgggccgaattcgagctcggtacggccagaatggcccggaccgaagcttgtgtctcaggtgtcagccaccacgactagtcaccccagtcccttggtcaagtcccaacgctcattcttcgtcgcacctggtccatcggcacaaacccgcatgaccttcacctttgtcgccgaccaccgtccctgtgctccgcacctacacaccataagccgacagacatggttgtacaacacatagctcgtactctggttagtcaaagaggcaaaagaagggctcaacaccactagccagacgtcaaaaccaaatcagatcactaaatcagcacgagtgctgaaatcaaagctagtttatccagaaagaggcaaacgacttaacacagctagcgaaagctccaaaaggctcaaatttctccccctagctgatttcccttgaaaagagcacaagaatctcaaagtctattccccaagaaaggagttccaaaaattcagaatccccaaaaatccagaaatttctcccccttgttaggagcccaagaaagtcaaaggctctcccctttattgacaaatgaactcatcaaacacatccaagggtagaaacaaaaattccccctcgacaagagatcccctgagaaaatgcagagatgcaaaagagagagtagaaaatgtaggagctttagaattataccagtcagagtgtaaagatgctctaagtgatgttgtgctatgtgtgcaacaataaatgcacgtgctagtagacgctcaaactgatccacctttcaaagattttttaaagagtgatcatagaccaaagagcagtttcaatttggaacccttgatgttttgtttcggcaagtgccatagtccttggagctcagtagttttttttctcttggagcagtggggggtgagggtgtccattaatttagtagagaagagatttggacgacatgttggttagatagaagcagaagaactttatataaaagtgacgtgagtgaaaaccatgacaacttgtactttataatagtagggagaggggtgggtactggccaacggctagcgggtgacgcggagtcttgtaggcggtggcggatgagcacgactattaatatagtagagaagagatttggacgatagaagtagaaggatttttatgtataattattgaaaaactgtgataactgatgttttataaagatatagacagatatagagatttacaaccaatattaaaagagtatatattttagggataaaaaattaaaaattaccggtgtatttttttaattgaagtcgaggagattgatgcaggaaattgaccttttacacggaccgcaaggctaaacttctgcatggttcggttgaaagcgcctacaaaggcgtccctaggcctcctagcccgtgccgcgcaacgtccggctcggacaccggaggctttctcacgcgtcccgatcgcctccgtccattaaggtccgtgttcgatcggatggctttcgatgacgagggttttgccccagacggtacaaatacggagcctcccaccccgcgccgccaccgcgctctttctctttcctcacgacgccgccgttgggagccctgcttcgggagagccccaacccttatcaaaccctaaatcaaaaactacccaaaaaaatccgcaaaatccagaaaaaaatcccaaaaatcaccacttgattggagcccgggggatctcgactctagaggatcgctcaggaaggccgctgagatagaggcatggcggccaatgcgggcggcggtggagcgggaggaggcagcggcagcggcagcgtggctgcgccggcggtgtgccgccccagcggctcgcggtggacgccgacgccggagcagatcaggatgctgaaggagctctactacggctgcggcatccggtcgcccagctcggagcagatccagcgcatcaccgccatgctgcggcagcacggcaagatcgagggcaagaacgtcttctactggttccagaaccacaaggcccgcgagcgccagaagcgccgcctcaccagcctcgacgtcaacgtgcccgccgccggcgcggccgacgccaccaccagccaactcggcgtcctctcgctgtcgtcgccgccgccttcaggcgcggcgcctccctcgcccaccctcggcttctacgccgccggcaatggcggcggatcggctgtgctgctggacacgagttccgactggggcagcagcggcgctgccatggccaccgagacatgcttcctgcaggactacatgggcgtgacggacacgggcagctcgtcgcagtggccacgcttctcgtcgtcggacacgataatggcggcggccgcggcgcgggcggcgacgacgcgggcgcccgagacgctccctctcttcccgacctgcggcgacgacggcggcagcggtagcagcagctacttgccgttctggggtgccgcgtccacaactgccggcgccacttcttccgttgcgatccagcagcaacaccagctgcaggagcagtacagcttttacagcaacagcaacagcacccagctggccggcaccggcaaccaagacgtatcggcaacagcagcagcagccgccgccctggagctgagcctcagctcatggtgctccccttaccctgctgcagggagtatgtgagagcaacgcgagctgccactgctcttcactgatgtctctggaatggaaggaggaggaagtgagcatagcgttggtgcgttgctgtcaagggcgaattcacatggttaacctagacttgtccatcttctggattggccaacttaattaatgtatgaaataaaaggatgcacacatagtgacatgctaatcactataatgtgggcatcaaagttgtgtgttatgtgtaattactagttatctgaataaaagagaaagagatcatccatatttcttatcctaaatgaatgtcacgtgtctttataattctttgatgaaccagatgcatttcattaaccaaatccatatacatataaatattaatcatatataattaatatcaattgggttagcaaaacaaatctagtctaggtgtgttttgcgaatgcggccgccaccgcggtggagctcgaattccggtccgggcctagaaggccagcttcaagtttgtacaaaaaagcaggctccggccagaatctcactgactagctaaacagcggccgcatcgagcagctggcttgtggggaccagacaaaaaaggaatggtgcagaattgttaggcgcacctaccaaaagcatctttgcctttattgcaaagataaagcagattcctctagtacaagtggggaacaaaataacgtggaaaagagctgtcctgacagcccactcactaatgcgtatgacgaacgcagtgacgaccacaaaactcgagcaacgagatcatgagccaatcaaagaggagtgatgtagacctaaagcaataatggagccatgacgtaagggcttacgcccatacgaaataattaaaggctgatgtgacctgtcggtctctcagaacctttactttttatgtttggcgtgtatttttaaatttccacggcaatgacgatgtgaccgtcgacccactaaaacattgctttgtcaaaagctaaaaaagatgatgcccgacagccacttgtgtgaagcatgagaagccggtccctccactaagaaaattagtgaagcatcttccagtggtccctccactcacagctcaatcagtgagcaacaggacgaaggaaatgacgtaagccatgacgtctaatcccagggcccggtgaccaatcgaattagcttggcgcgtggaccgaagcttgcatgcctgcagtgcagcgtgacccggtcgtgcccctctctagagataatgagcattgcatgtctaagttataaaaaattaccacatattttttttgtcacacttgtttgaagtgcagtttatctatctttatacatatatttaaactttactctacgaataatataatctatagtactacaataatatcagtgttttagagaatcatataaatgaacagttagacatggtctaaaggacaattgagtattttgacaacaggactctacagttttatctttttagtgtgcatgtgttctcctttttttttgcaaatagcttcacctatataatacttcatccattttattagtacatccatttagggtttagggttaatggtttttatagactaatttttttagtacatctattttattctattttagcctctaaattaagaaaactaaaactctattttagtttttttatttaataatttagatataaaatagaataaaataaagtgactaaaaattaaacaaataccctttaagaaattaaaaaaactaaggaaacatttttcttgtttcgagtagataatgccagcctgttaaacgccgtcgacgagtctaacggacaccaaccagcgaaccagcagcgtcgcgtcgggccaagcgaagcagacggcacggcatctctgtcgctgcctctggacccctctcgagagttccgctccaccgttggacttgctccgctgtcggcatccagaaattgcgtggcggagcggcagacgtgagccggcacggcaggcggcctcctcctcctctcacggcaccggcagctacgggggattcctttcccaccgctccttcgctttcccttcctcgcccgccgtaataaatagacaccccctccacaccctctttccccaacctcgtgttgttcggagcgcacacacacacaaccagatctcccccaaatccacccgtcggcacctccgcttcaaggtacgccgctcgtcctcccccccccccctctctaccttctctagatcggcgttccggtccatgcatggttagggcccggtagttctacttctgttcatgtttgtgttagatccgtgtttgtgttagatccgtgctgctagcgttcgtacacggatgcgacctgtacgtcagacacgttctgattgctaacttgccagtgtttctctttggggaatcctgggatggctctagccgttccgcagacgggatcgatttcatgattttttttgtttcgttgcatagggtttggtttgcccttttcctttatttcaatatatgccgtgcacttgtttgtcgggtcatcttttcatgcttttttttgtcttggttgtgatgatgtggtctggttgggcggtcgttctagatcggagtagaattctgtttcaaactacctggtggatttattaattttggatctgtatgtgtgtgccatacatattcatagttacgaattgaagatgatggatggaaatatcgatctaggataggtatacatgttgatgcgggttttactgatgcatatacagagatgctttttgttcgcttggttgtgatgatgtggtgtggttgggcggtcgttcattcgttctagatcggagtagaatactgtttcaaactacctggtgtatttattaattttggaactgtatgtgtgtgtcatacatcttcatagttacgagtttaagatggatggaaatatcgatctaggataggtatacatgttgatgtgggttttactgatgcatatacatgatggcatatgcagcatctattcatatgctctaaccttgagtacctatctattataataaacaagtatgttttataattattttgatcttgatatacttggatgatggcatatgcagcagctatatgtggatttttttagcactgccttcatacgctatttatttgcttggtactgtttcttttgtcgatgctcaccctgttgtttggtgttacttctgcaggtcgactttaacttagcctaggatccatggccactgtgaacaactggctcgctttctccctctccccgcaggagctgccgccctcccagacgacggactccacactcatctcggccgccaccgccgaccatgtctccggcgatgtctgcttcaacatcccccaagattggagcatgaggggatcagagctttcggcgctcgtcgcggagccgaagctggaggacttcctcggcggcatctccttctccgagcagcatcacaaggccaactgcaacatgatacccagcactagcagcacagtttgctacgcgagctcaggtgctagcaccggctaccatcaccagctgtaccaccagcccaccagctcagcgctccacttcgcggactccgtaatggtggcttcctcggccggtgtccacgacggcggtgccatgctcagcgcggccgccgctaacggtgtcgctggcgctgccagtgccaacggcggcggcatcgggctgtccatgattaagaactggctgcggagccaaccggcgcccatgcagccgagggtggcggcggctgagggcgcgcaggggctctctttgtccatgaacatggcggggacgacccaaggcgctgctggcatgccacttctcgctggagagcgcgcacgggcgcccgagagtgtatcgacgtcagcacagggtggagccgtcgtcgtcacggcgccgaaggaggatagcggtggcagcggtgttgccggcgctctagtagccgtgagcacggacacgggtggcagcggcggcgcgtcggctgacaacacggcaaggaagacggtggacacgttcgggcagcgcacgtcgatttaccgtggcgtgacaaggcatagatggactgggagatatgaggcacatctttgggataacagttgcagaagggaagggcaaactcgtaagggtcgtcaagtctatttaggtggctatgataaagaggagaaagctgctagggcttatgatcttgctgctctgaagtactggggtgccacaacaacaacaaattttccagtgagtaactacgaaaaggagctcgaggacatgaagcacatgacaaggcaggagtttgtagcgtctctgagaaggaagagcagtggtttctccagaggtgcatccatttacaggggagtgactaggcatcaccaacatggaagatggcaagcacggattggacgagttgcagggaacaaggatctttacttgggcaccttcagcacccaggaggaggcagcggaggcgtacgacatcgcggcgatcaagttccgcggcctcaacgccgtcaccaacttcgacatgagccgctacgacgtgaagagcatcctggacagcagcgccctccccatcggcagcgccgccaagcgcctcaaggaggccgaggccgcagcgtccgcgcagcaccaccacgccggcgtggtgagctacgacgtcggccgcatcgcctcgcagctcggcgacggcggagccctggcggcggcgtacggcgcgcactaccacggcgccgcctggccgaccatcgcgttccagccgggcgccgccagcacaggcctgtaccacccgtacgcgcagcagccaatgcgcggcggcgggtggtgcaagcaggagcaggaccacgcggtgatcgcggccgcgcacagcctgcaggacctccaccacctgaacctgggcgcggccggcgcgcacgactttttctcggcagggcagcaggccgccgccgctgcgatgcacggcctgggtagcatcgacagtgcgtcgctcgagcacagcaccggctccaactccgtcgtctacaacggcggggtcggcgacagcaacggcgccagcgccgtcggcggcagtggcggtggctacatgatgccgatgagcgctgccggagcaaccactacatcggcaatggtgagccacgagcaggtgcatgcacgggcctacgacgaagccaagcaggctgctcagatggggtacgagagctacctggtgaacgcggagaacaatggtggcggaaggatgtctgcatgggggactgtcgtgtctgcagccgcggcggcagcagcaagcagcaacgacaacatggccgccgacgtcgggcatggcggcgcgcagctcttcagtgtctggaacgacacttaagcgtacctagtggtacctgacatcttatagtctgcaacctctcgtgtctgaattcctatctttatcaagtgttattgcttccacgactataggacagctttcgtcgaaagcttttgctcatgtgatctcgaaggattcatctagtctgatttttcgtgacttgtatcggttttattggattcatccaacatatatcaataaaaaatgagttgtgtttcctttcttcctagttcagttaaaattatttccctcctgcgcttgtgctgtaattgtctgtgtacctgttgtttgtgactgtgttagttcccttggatatgatttcgtatttgatatgtacatggagatagcttagcttcattattggagtatgaagttagtatgacatagtcactctcctggaaaattgacactgcaaaccatatttttattctgaaccacaaatcctagtcagtccgctggcatatgccgtccgtttgctgaatccagaacgtgggtttggagatgtacggctgagatgcctctatgcgaaggggatttcgtggtgaaacgagatgggagtagagcaacgcccgtggaagatgcttcaaacttccacacttttgagcaacgatcggcagtagtaaggtagacgatttcaagatcaaagcatatgaagataaacaacatcaacaacaaaatttgttggggttctatagagagaaacagagctacatacatacactgttttgtatctaccatctgagatgatgaaaagatgaaaaactaaagaatgccccggcgccaacgccaggacacgccgcgcgcgcgtcacccgagccatctcttgacccagccggcgctgtatatttacacacgttgcagcatcgatcaccacctgttcgatcgcgtcgccgtcaccggcgcgccgcgacttattgaactagtctagggcgcggctaacaacctagcttagattgccttgtctaaacccttaggctaacgcgccactctagaaggccgatctcccccgaacgcgccagatccgatatcgatgggccctggccgaagcttggtcacccggtccgggcctagaaggccgatctcccgggcacccagctttcttgtacaaagtggccgttaacggatcggccagaatggcccggaccgggttaccccgcggttcaaagccaatgactgttgttaggtccagtttctaaggacgaatcatccaatcactggttctttctgaacaaaacaaagagctatagagttacgttactgtagccgagacagagcctgcaatctggttatgccacatactaggttctttcttaaagttgactcactctatcctaagttctacttacaaggagctacaacaaattggtcataaccggagagcgttcaaggaggtaatatcccatcttactctgtagcaaggctacaaaaggagagctaaagaactaggctacaaaaagagagctaaagaactaactatctagcaagactacagagctatagtgtagagatttcataaccggtgagcgttcaaggatactttgaagagaagaggtaatatctcaactagcaagactacaaaaaaatggagatataaaactaactgtctaacaagactacagagctatagtagagatagatacgttcgacacttaagcatgagaattcgagctcggtaccctggttcacaaactcaatacaacacacagtggagtagggtattacgctccggcggcccgaaccactctaaatccttgtgtcctcgtgtgctcttccaccattaatgactgtaattgcagggacacgaagagttgtagcgcttttgccaacaagatccgctatatgctagtagagtggaacctgcacagcaacaagcatccaataatctgagaataagaattatgtgtggtgatggttctcatctctgcaactcgccattttcgcgagagaaccaaatccaagttggtgaagatcatgatttgggctcatgggctggcatagtagctattacctttgcaattgtggttcgaatctatccgatattctccttttcagggagagctaatgcttatgcttattgggtattttggtttgacactgcttcacgcccaaaaaaaggcaactatgtctgagttggatatggcccaaaaaaaggcagctatgtctgagttggatatggaagtcttctttcgtttagggtgaagtaagaccaagctcatgagcttattatcttaggtcggaacaaattagttgataggcatggcacatttatcaaattataatgattttaacagaaaagcaacacctctttttcagcagcaccagctttgcaagctgcaattgacactccaagcatagtatttgctccaaactcagcctgcatttcgcacaatatcatatctatttccatttggataaaatatattttccagaaatatgggaacagaatcaagatacagaaaaaagttgtggtagtagtggtaagtggaaacacaagtacagtgaaaagatagcattatttctgaacagtcaaattaaccgaaataagtagtatcacatactgcccctaaattgactacacccaatgtaaagaattgcttgagcatattgagccatcagttgtttgtttgtgtaacggatttgacaatgcagagttcaggagcaaaaaaccgcaaaggagagaaagagggaaaggatctcctagtatcccaccttgtggcgcgccctgtcaagtgcatgatggcctggtcgatctgcgtctgctgctgcggttccatcccaacgagtgcctccgacaccttgtcgttgatcacccgcaccgcgtaggcgacccccctggcgaggaacttccgcctctcggaggccccggccgcgtcggcggcggcgccctcgagcgcgcccacgctagccgtagatgctcggtgcacggccttgttggtgtgcaactcgacctcaacggccggtgcgctacgcccgtcaaggatctggcgcgcccgcaccctcgtgatcacggtgggcgcctcccgcctcatgtggccgacgatgaaaagcgccgggttaggggccttggcgcgcaccgccgtattcagggcctcctcgctcttgcgcgagagcaggtgcttccccaggtactcctgcactgacaaggctgccacagcggtggaatttgtcctcacgacttcgccacgtcgtcctcacctccctggcttcccacgactccgccgtatcgaggtgctcggtgggtcgtcttaatccgaagtccgaactaggaagacgagacagagaggtctgaggaatgggcctcgtttgatgttgagctgaattatttttccagcataagcccaggtcttggtccatgaacaaaattactagaaacccagcccagtactacgatctaaaagagggactgccactggatagctctctctagcattctccacgctccaatacagcggcgtcgtgtctatccgggtctatccgcgaacacgtgagaactctccagaaactgctttctcctccacttcatctctctcgctttccctctataaaaagaccccttctaggaattgagggagacagcaagcaccaagcagcgatccgaagctcaatcaattcactcaaacctcttccccaaatcttcgattagatcttcgttgacaagaagactagaaccgaacctgacatgtccaacctgctcacggttcaccagaaccttccggctcttccagtggacgcgacgtccgatgaagtcaggaagaacctcatggacatgttccgcgacaggcaagcgttcagcgagcacacctggaagatgctgctctccgtctgccgctcctgggctgcatggtgcaagctgaacaacaggaagtggttccccgctgagcccgaggacgtgagggattaccttctgtacctgcaagcgcgaggtttgtttctgcttctacctttgatatatatataataattatcattaattagtagtaatataatatttcaaatatttttttcaaaataaaagaatgtagtatatagcaattgcttttctgtagtttataagtgtgtatattttaatttataacttttctaatatatgaccaaaacatggtgatgcctaggtctggcagtgaagaccatccagcaacaccttggacaactgaacatgcttcacaggcgctccggcctcccgcgccccagcgactcgaacgccgtgagcctcgtcatgcgccgcatcaggaaggaaaacgtcgatgccggcgaaagggcaaagcaggccctcgcgttcgagaggaccgatttcgaccaggtccgcagcctgatggagaacagcgacaggtgccaggacattaggaacctggcgttcctcggaattgcatacaacacgctcctcaggatcgcggaaattgcccgcattcgcgtgaaggacattagccgcaccgacggcggcaggatgcttatccacattggcaggaccaagacgctcgtttccaccgcaggcgtcgaaaaggccctcagcctcggagtgaccaagctcgtcgaacgctggatctccgtgtccggcgtcgcggacgacccaaacaactacctcttctgccgcgtccgcaagaacggggtggctgcccctagcgccaccagccaactcagcacgagggccttggaaggtattttcgaggccacccaccgcctgatctacggcgcgaaggatgacagcggtcaacgctacctcgcatggtccgggcactccgcccgcgttggagctgctagggacatggcccgcgccggtgtttccatccccgaaatcatgcaggcgggtggatggacgaacgtgaacattgtcatgaactacattcgcaaccttgacagcgagacgggcgcaatggttcgcctcctggaagatggtgactgaggtacccaacctagacttgtccatcttctggattggccaacttaattaatgtatgaaataaaaggatgcacacatagtgacatgctaatcactataatgtgggcatcaaagttgtgtgttatgtgtaattactagttatctgaataaaagagaaagagatcatccatatttcttatcctaaatgaatgtcacgtgtctttataattctttgatgaaccagatgcatttcattaaccaaatccatatacatataaatattaatcatatataattaatatcaattgggttagcaaaacaaatctagtctaggtgtgttttgcgatccgatatcgaattggccacggtaccagctgctgctgttctagggttcacaagtctgcctatttgtcttccccaatggagctatggttgtctggtctggtccttggtcgtgtcccgtttcattgtgtactatttacctgtaatgtgtatccttaagtctggtttgatggtgtctgaaacgttttgctgtggtagagcagcatggaagaactataatgaataagtgatccctaatcattgtgtccaaattttgcttctgctatacccttttgtgctgtttcttatgttttgcttaaaaatttgatctgacaaacaaatttgtctaaattatgctcttgttctgactgtgtactgtacacatttgtattgctaccggtttggcacatagttttctctttgattgcagatcaaacccttctgattgcagattgcttggctatggctgatgtgctcactgttcttctttagcttgtatattgctgatggtggcttggctacggctgaaaaagttgctgctgcgccgacttggcaactgttgctccagtaatgctttgtcctctcttcctagccgccgacttggcacttggcagctgttgctcctgtaatgcgttgttatctcttatctcttgagatgtactatgattttgaggctgtttgacttgtgccagattgccagtgctgatgctatattatctcaggtttttatgctagtatatgttttactgtgtgctgcctgtgtcgagttacgtaatctattgaaccgctatgcgtgttgatgccctgttgttgcttgccagattgatgcccctgttgcttgcagcttgcaagctgtagtgaaatcctaaaattccaaaccaaatctattctgaacttttgaagatctgtgatgtccggaagaaaagattcaaacagataaacgggactctccagaatctataaaataaatgatcgacaaacgctttgctttggtaggcttcaagcttggtcacccggtccgggcctagaaggccagcttcggccgccccgggcaactttattatacaaagttgatagataaatcagatatctggttcctaaggacccggcggaccgattaaactgattcggtccgacgcgttacctaataacttcgtatagcatacattatacgaagttattagctaactaactagtaagcttaagccatgggtcgacggatccgttaactagcgtggcatttggcaccgccgcacactatgcgagctaggagtgctagtttacagatgaaactatgaaaccaagaaaacacaattgtccgtagctagcgcgtggcgtcgtgtcaagcttcacacagtatcttcgttcttcactataaatcgcgcctgttgttcgtgagacccaccaccgtggataacagtcccctaataataagcgatcaacagcactgctgatggctgaacaccgaggcgccgccgcgcgtaaccatccgccggagcagcccgtcgtgccggcgaacgacgccttccccgaccgcgcccagcagctctgcctcgacgccgggcgcgcgctcgcgatgtgcggcgtgctcgtcgccgtccctcccgcattttacgcgtcgacgtcgcggacgacaccgcacttgccttcgtcggcttcgtcctctggatcatcggtgcgtggctgtgcctcctggcgctcacgcccttggctccacgggcggtgagggcgggcggggccgccgccagcaccttgctgatcaggtgcctgtccctttcatgaactactagcgcccgcgcccgcggccgccgggcacaagagaacacatcgatgttcgctgcgtacgtcagcaataaggcactctttgtcagtagtcgagtgcatatgttgggtgtttgccctgggagatttcaagtgttgtggccattatcccgcaggataaaaaatcggcggcttttggattgatacggaaaataacgatgtttcatgctcgtgttgtgtgtgtgacatcttgtcagccaagtttttaaccgttgctactccccctctgtgggctcagtgtgtggaccggaatacgtcgtacataggccgtagcctaagcccaatatgccgtttttcaggttggcctgtgtgacgacaagcgggtctcaaaagcccatcacgcaactggcctgcaattattggaggagagcgcgtcgagttggttccagaggctgcgtggtggggccggactctgcgacgacctctcgttcgcgtccgatttggttgccgtgagccgtgacgtaacgcctccttccgttcctccctatataagttccacccccgggtccggtttccccaagccccagtgacccccgatcccgatcgcgaaatctccgcacccgccggcaagggaccgaagcaagcctctctcccgaccgtcgcatcaaggtacgcgtccgctcgatctgtcctcttccttctcgatttgacttgctgtggtgcccgatcacgggatcagaatcgcaccagtgtagatttcgcatgttctaagatgtgttagtttccaggctaatccagttctcttgacgcccgatccgatcgagctccgtgtttatttcagcctaatcgtagtattcccctaaaatttcctcattagggggttcgcaagattgttggtcgacaggttcacttatgctcgatcgcttacttttagtcgattcatgctgcgtactattgttgccccccgtggttttatcttttctcgtgtgaaatccagtagatatagtagatatcgtagcattaggttttaattcaatcgattgattattgtatcatcaaaattgagaagttcgaatcatgcctatcatgctgcctcaaccgaaatcctgtatattgaagtttcaattcaattgattgatcattcattagattcaaccaaaatctagaaggttagatgacgcatgtcatgctgcctgcgtagtttacctttgatctgtttatgattaccttatcagtaggatatttgtgattttgggaagtagcactaactgattcatgctgacatgatgttccctttcagattatactgttgagtcctatctaattgatgctttgtatgctatatgaatacgtcatggtaaattagcagttaattagcatattagcaattgggcgtacctcatcaggattgctcttgtagatgtgtgtggtgatgtttcttgttcaattcatgttctgctttaaaagtatgtgttctctgtttgttaattaagattcatggttataatgatttggacctaattaatcagggttgcccttttagatgcgtggttacttgttgagttcatttttttcctgctatagttgtatgcgtttgttcattcatggttagatttgatttgtttcttctctattccatgccttccatatacttcaattgtagcttaacatgagatttctgtatatgcaggtcgaccgccggggatccacacgacaccatggcccagtccaagcacggcctgaccaaggagatgaccatgaagtaccgcatggagggctgcgtggacggccacaagttcgtgatcaccggcgagggcatcggctaccccttcaagggcaagcaggccatcaacctgtgcgtggtggagggcggccccttgcccttcgccgaggacatcttgtccgccgccttcatgtacggcaaccgcgtgttcaccgagtacccccaggacatcgtcgactacttcaagaactcctgccccgccggctacacctgggaccgctccttcctgttcgaggacggcgccgtgtgcatctgcaacgccgacatcaccgtgagcgtggaggagaactgcatgtaccacgagtccaagttctacggcgtgaacttccccgccgacggccccgtgatgaagaagatgaccgacaactgggagccctcctgcgagaagatcatccccgtgcccaagcagggcatcttgaagggcgacgtgagcatgtacctgctgctgaaggacggtggccgcttgcgctgccagttcgacaccgtgtacaaggccaagtccgtgccccgcaagatgcccgactggcacttcatccagcacaagctgacccgcgaggaccgcagcgacgccaagaaccagaagtggcacctgaccgagcacgccatcgcctccggctccgccttgccctccggactcagatctcgatagagtcaacctagacttgtccatcttctggattggccaacttaattaatgtatgaaataaaaggatgcacacatagtgacatgctaatcactataatgtgggcatcaaagttgtgtgttatgtgtaattactagttatctgaataaaagagaaagagatcatccatatttcttatcctaaatgaatgtcacgtgtctttataattctttgatgaaccagatgcatttcattaaccaaatccatatacatataaatattaatcatatataattaatatcaattgggttagcaaaacaaatctagtctaggtgtgttttgcgaattgcggcgcccttactttaacgcctctaaccaacacccctttatctttataaggaacaataaacagaatttgccccactgttctaaatcacctaataatatccccagctaaaaacaataaaggtttcctagaattaagacaagcatgactgttcctccaggagggtttggaacattgttgcagtcttgcagatacgggcgaagggtgagaaacagagcggagggctggaggtgacctcggtagtcgacgccggagttgagcttgacaacgacggggcggcccctgatggacttgaggaagtccgatggcgtcttcaccgtcccgccggcgcccgaggcgggcctgtcgctgccgccgccgccgctgctcatcttgcgcgctgtgcccccggcggtgtccctgtgttgcggatcgcgggtgggccaggtggatgcgagggcgacccgtttggactccggccggagccgccggatccctggtcggtgtcagtgccgtttactctgggccccacgtgtcagtaccgtctgtagatgacaacaacccgtcgtccacagtcatgtccaaaatatcctttcttcttttttttcgattcggatatctatcttccttttttttttccaaaaatcttcttgacgcaccagcgcgcacgtttgtggtaaacgccgacacgtcggtcccacgtcgatagaccccacccaccagtgagtagcgtgtacgtattcgggggtgacggacgtgtcgccgtcgtcttgctagtcccattcccatctgagccacacatctctgaacaaaaaaaaggagggaggcctccacgcacatccccctccgtgccacccgccccaaaccctcgcgccgcctccgagacagccgccgcaaccatggccaccgccgccgccgcgtctaccgcgctcactggcgccactaccgctgcgcccaaggcgaggcgccgggcgcacctcctggccacccgccgcgccctcgccgcgcccatcaggtgctcagcggcgtcacccgccatgccgatggctcccccggccaccccgctccggccgtggggccccaccgagccccgcaagggtgctgacatcctcgtcgagtccctcgagcgctgcggcgtccgcgacgtcttcgcctaccccggcggcgcgtccatggagatccaccaggcactcacccgctcccccgtcatcgccaaccacctcttccgccacgagcaaggggaggcctttgccgcctccggctacgcgcgctcctcgggccgcgtcggcgtctgcatcgccacctccggccccggcgccaccaacctagtctccgcgctcgccgacgcgctgctcgattccgtccccatggtcgccatcacgggacaggtggcgcgacgcatgattggcaccgacgccttccaggagacgcccatcgtcgaggtcacccgctccatcaccaagcacaactacctggtcctcgacgtcgacgacatcccccgcgtcgtgcaggaggctttcttcctcgcctcctctggtcgaccagggccggtgcttgtcgacatccccaaggacatccagcagcagatggcggtgcctgtctgggacaagcccatgagtctgcctgggtacattgcgcgccttcccaagccccctgcgactgagttgcttgagcaggtgctgcgtcttgttggtgaatcgcggcgccctgttctttatgtgggcggtggctgcgcagcatctggtgaggagttgcgacgctttgtggagctgactggaatcccggtcacaactactcttatgggcctcggcaacttccccagcgacgacccactgtctctgcgcatgctaggtatgcatgggacggtgtatgcaaattatgcagtggataaggccgatctgttgcttgcacttggtgtgcggtttgatgatcgcgtgacagggaagattgaggcttttgcaagcagggctaagattgtgcacgttgatattgatccggctgagattggcaagaacaagcagccacatgtgtccatctgtgcagatgttaagcttgctttgcagggcatgaatgctcttcttgaaggaagcacatcaaagaagagctttgactttggctcatggaacgatgagttggatcagcagaagagggaattcccccttgggtataaaacatctaatgaggagatccagccacaatatgctattcaggttcttgatgagctgacgaaaggcgaggccatcatcggcacaggtgttgggcagcaccagatgtgggcggcacagtactacacttacaagcggccaaggcagtggttgtcttcagctggtcttggggctatgggatttggtttgccggctgctgctggtgcttctgtggcaaacccaggtgtcactgttgttgacatcgatggagatggtagctttctcatgaacgttcaggagctagctatgatccgaattgagaacctcccagtgaaggtctttgtgctaaacaaccagcacctggggatggtggtgcagttggaggacaggttctataaggccaacagagcgcacacatacttgggaaacccagagaatgaaagtgagatatatccagatttcgtgacgatcgccaaagggttcaacattccagcggtccgtgtgacaaagaagaacgaagtccgcgcagcgataaagaagatgctcgagactccagggccgtacctcttggatataatcgtcccacaccaggagcatgtgttgcctatgatccctagtggtggggctttcaaggatatgatcctggatggtgatggcaggactgtgtactgactagctagtcagttaacagatctgccagatcctcggtgtacaaataacccgtcttatcctatgagacgggccggcgtcagtgtgttctggaggaatttttatgtcagagcctttttctttgtgtgcttgatgtagatgccaagggaagcttattggctgttgaagcttgatgcaaaataaattatggaactctgttttttgtttatctaataataactagcaaatatgcttccattgcattgaaactaacagccttttgtgtttccaagttttattttgtgacaatgtcatctatttcaattagttgtggaatcggaaacttgcaggactaacttggaaactccaatccctcagcatcctggactttttcctggtgtaatccatgtagatattattttaatcatcattttagttctggaggtttttccatctccggttttgctcccctttcttcaaaaaaaaaaaaaaaatgccgtaggcgccgcaacgcccacctgttgttcaaactcatgggcacgagtggctcgaagattttatacaacaattgctgtagtttcaccgttgctggtgaagaagcatttttttaaaaaaatatagtggtattcattttaattagtttagttgtgcagcgagcaaaatttggacatgctctgctcggaatctgatcgacctagacacagattagcagcagtagctttgtcatctgttccaagagttgcgatctgatagaagaaaaaaaaaccttcccttcaatgtaaaaccgaaactaacaagaaagaagcacagtgccgtttaggcaagtatggagtacgtattaagcatgtagaaggccatgcatgaaccactaacaagaaagaagcgcagtgccattcaggcaagcataagcatgtagattggcatgcatgaacaactaacagtagatcgtctctggtctgattagaagttttttgggaagccaagaaatcatgtacaactggttccatctcaaattccgtggcaaaaagaggcctaagcaacatacctcgagtagatcacattcaagcttggtcacccggtccgtcaatattctgattccgatgacttcgtaggttcctagctcaagccgctcgtgtccaagcgtcacttacgattagctaatgattacggcatctaggaccgactagtggcgcgccgactagctagctaaggtaccgagctcgaattcattccgattaatcgtggcctcttgctcttcaggatgaagagctatgtttaaacgtgcaagcgctactagacaattcagtacattaaaaacgtccgcaatgtgttattaagttgtctaagcgtcaatttgtttacaccacaatatatcctgcca

SEQ ID NO: 281 - DNA, 24716 bp, Artificial Sequence
  PHP99810
gtttacccgccaatatatcctgtcaaacactgatagtttaaactgaaggcgggaaacgacaatctgatcatgagcggagaattaagggagtcacgttatgacccccgccgatgacgcgggacaagccgttttacgtttggaactgacagaaccgcaacgttgaaggagccactcagcaagctggtacgattgtaatacgactcactatagggcgaattgagcgctgtttaaacgctcttcaactggaagagcggttacgctgtttaaacgctcttcaactggaagagcggttactaccggttcactagctagctgctaatcgagctagttaccctatgaggtgacatgaagcgctcacggttactatgacggttagcttcacgactgttggtggcagtagcgtacgacttagctatagttccggacttacccttaagcgatttaaatctgcggttaccgaattcgagctcggtacctagtacccttgtacttttggtttcacctgcatagagaaaacccacaagaatatgacagtctgatttgtcagtctcattctcaagcaacatttctctatccgttactttcatggtgaataacacaatccatcatcaatactttgtgttactcagaaactgaaagttattccgagtcttgcatatctttggacctactcgtttttctaccattattgctgattgttaagctctcgctacttgaatcggcattgttggagtgggaaggttcaaaaaattggagttatgactagttgtctctttctatgtacgatggagaaaatgaataaacaactgagaaaatggctcttgtttagttgatgatgctcttaagctttccactggttgccatatatgatttgggcatttcactttgatcttaatgggccttgtaaagcccaagactcatgattatctttagttgatgctcttaattaggtgtgggcaaataattcaaactgtatgtacccgaccaaaaccaaagcaaaaataatcgaaccaaaccgaaaatttaaaaataaccgaatgaaaactaaatcctataactgaaagaactgaaaccgaatcaaaatatttaatgtaaccaaaaatatccgaaatataattatattgtcaaaaatattaataatttctagattaaataattaaaaatacttaaaaatttatataaaatagtaaaaatactcgaaaataaccacaaatattcaaaaacaaccgaaatatcccaaaatattcaaagcaaaataaccgaatggataccaaattttaaaaccgaaaaaactggaacaaaaccaaaatcgaaccaaaatttcaaaaatcgaataaatactaaactttagaacaaaaaaaaacgataaccgaatgtatacgaaccaaagccgaattagataaccgaacgtccaggactactcttaatctttccgccacttatgatttgggctattactttgtttataatgagccttttcaagctcaagttcatgattgtccgtgagatgagaaactgacttgttggattcgaaaccctagctagtattggttaatacttaatacataaatgacctgcattgacatcatcatccaagaaaataaaaattgtatgcttgagatatttagttttcctagctaggttttctttattttagtaccgaatctttaggtgtgccacgttaatttagacccattttttcatacttaccaactgagtctagtttaatcatgactataatcgtataaaatgattcagtcgacgtcattgcgaacgtatataaaatcatccaaattgacgtcattccaaagaggtaagcatgcttatctaagagtccgagcatactaaacaagacgacattttatttgcactccaaatcaaattttgtattgcctaaagaaaaacaatcaaactcaagtttcttaaaattaatttcattcaaactaatcactttcaatatctcacatattattcatgccatttctatttgtctaaacatgatttaaaaaaaaaagtaaaatacaaagattactatgcaaaaactctataaaaaaaaattcaaatttcttatttatttgtgacatcaaattttcaaaataatttttttaattatcggttgatccggtcagtcgataaaaacataaactttcagcgaccgttaaaactttcctactaccgatttagagaaaatcttagcttgaaacgtaattgtaacctgccttcatgcaagtcgcaagatatgtcatcctaagttgtatatgttttctcaaaagatgtatttacttgagaaaatacgtttcaacgttgatggacaaccaattaagaatcaagcacctttcgtaatcaatttaggcttatcgtctaaggtatactgatttacgacagttgactagacttataaggaacaaaataatagaatagtttctaaacacttcacctaatcatagagactaagatggtaattcgtaaacgacaaagcctagtgacactgtccattgtaaaattccacatcatattagtattaaacatatacatgtagtttcctgaacacatgtagtatcaaacacacttcgtggcttcttcctcgaaacctgcggccgcgctatagttccggacttacccttaagataacttcgtatagcatacattatacgaagttatgggcccacgcgtgaagagcggttaccagagctggtcacctttgtccaccaagatggaactgtcttcggccagaatggccatctggattcagcaggcctagaaggccatttatcgctatcaactttgtatagaaaagttgggccgaattcgagctcggtacggccagaatggcccggaccgaagcttccggatagtgtccggtgcgccagccacgtcaccaggccgttgggttccgaccgttggagctctgacttgtgggcccgcctgacatgtccggtgaattatagcggagcggattcccgaagctagcgggttcagagtcgctctcctctggagcaccggacagtccgttgaattatagcgaagcgtctctgagaatcccgaaggtgatgagttcagcttggagttccctggtgcaccggacagtccggtgcgccagaccagggcacacttcggttatcccttgctctctttgttgaacccttttcttggtctttttattggcttatgtgaacctttggcacctgtagaacttatagactagagcaaactagttagtccaattatttgtgttgggcaattcaaccaccaaaaccaattaggaaataggtgtaagcctaattccctttcaaatagggactccaatactcgctaaccgatgctaaatcccttattagggttaggatatcagacaaaaagtctccccattggtataaatatgagacaaaatattcacccattaggtaagcagaaatgggtttggaaagaaatcatccaaaaccaattaaccatgagtaatattcacctagtgaaattaaatgtgtgtcctaatagataataagcacaacaactaactcaatctctttcaactaacttaatctctttcaacccttttaagcacccatccacctagcctaggtggtcagccactagccgtcccatccactagtccatatgttttttttttgtgttttgctgttttgtatggttaaacatatttttttattaaatgtcagatttattggtagtgtattattgttaggtgccgtgtgactgttaatgtcatatgaaatataatttaatagtgttttccttgtcatggatgaggacccattgagaccctatatcagaataaggatgtgtatgagatgaatcttatatcataatagatataagtatgaaaatagggatgtgtataacttcatgagaccgtgtccaacaaggacctgtatgtggttctgtacgccaaatttacaggacgccgagctcctttgttggtccagcaacggacggtaaagcctccggtaaaataccggacgctgcctgcgcatgctacatttagcgtttcactgtgcgtccgctacgcagccggccagcaggggcatagtgctgatacgacaaggatggcccacatgcagctcgtgggaccaggagctcacaggaggaggcaacgacattggaacatgggtcgggcccacagttgtcaaaaaatatagaatataggatatagaggaggaaatttagagaacgctgctggagatggtagagatatagaggatgtaatattttagagtgtactgtaaaggacgaaaaatatttttttagaggatgaaatttaaaggacgttgctgaagatagcctgaggatgagtactagatgtctggagtctgaacctggtggagaattccccacagaaggagaaggaaaataaactagggtttagccggggccacacggcaggctccacggcgtggttatgtccgcctttattctccccccactcgtctgcttcgcctccacctatccgccgcctcccaatcatcctgcccccaaactcccaccccgcagcatccccacgccaccacacctcgtcgcgtcgcgtcgtcaccggcgtgaagcccgggggatctcgactctagaggatcgctcaggaaggccgctgagatagaggcatggcggccaatgcgggcggcggtggagcgggaggaggcagcggcagcggcagcgtggctgcgccggcggtgtgccgccccagcggctcgcggtggacgccgacgccggagcagatcaggatgctgaaggagctctactacggctgcggcatccggtcgcccagctcggagcagatccagcgcatcaccgccatgctgcggcagcacggcaagatcgagggcaagaacgtcttctactggttccagaaccacaaggcccgcgagcgccagaagcgccgcctcaccagcctcgacgtcaacgtgcccgccgccggcgcggccgacgccaccaccagccaactcggcgtcctctcgctgtcgtcgccgccgccttcaggcgcggcgcctccctcgcccaccctcggcttctacgccgccggcaatggcggcggatcggctgtgctgctggacacgagttccgactggggcagcagcggcgctgccatggccaccgagacatgcttcctgcaggactacatgggcgtgacggacacgggcagctcgtcgcagtggccacgcttctcgtcgtcggacacgataatggcggcggccgcggcgcgggcggcgacgacgcgggcgcccgagacgctccctctcttcccgacctgcggcgacgacggcggcagcggtagcagcagctacttgccgttctggggtgccgcgtccacaactgccggcgccacttcttccgttgcgatccagcagcaacaccagctgcaggagcagtacagcttttacagcaacagcaacagcacccagctggccggcaccggcaaccaagacgtatcggcaacagcagcagcagccgccgccctggagctgagcctcagctcatggtgctccccttaccctgctgcagggagtatgtgagagcaacgcgagctgccactgctcttcactgatgtctctggaatggaaggaggaggaagtgagcatagcgttggtgcgttgctgtcaagggcgaattcacatggttaacctagacttgtccatcttctggattggccaacttaattaatgtatgaaataaaaggatgcacacatagtgacatgctaatcactataatgtgggcatcaaagttgtgtgttatgtgtaattactagttatctgaataaaagagaaagagatcatccatatttcttatcctaaatgaatgtcacgtgtctttataattctttgatgaaccagatgcatttcattaaccaaatccatatacatataaatattaatcatatataattaatatcaattgggttagcaaaacaaatctagtctaggtgtgttttgcgaatgcggccgccaccgcggtggagctcgaattccggtccgggcctagaaggccagcttcaagtttgtacaaaaaagcaggctccggccagaatctcactgactagctaaacagcggccgcatcgagcagctggcttgtggggaccagacaaaaaaggaatggtgcagaattgttaggcgcacctaccaaaagcatctttgcctttattgcaaagataaagcagattcctctagtacaagtggggaacaaaataacgtggaaaagagctgtcctgacagcccactcactaatgcgtatgacgaacgcagtgacgaccacaaaactcgagcaacgagatcatgagccaatcaaagaggagtgatgtagacctaaagcaataatggagccatgacgtaagggcttacgcccatacgaaataattaaaggctgatgtgacctgtcggtctctcagaacctttactttttatgtttggcgtgtatttttaaatttccacggcaatgacgatgtgaccgtcgacccactaaaacattgctttgtcaaaagctaaaaaagatgatgcccgacagccacttgtgtgaagcatgagaagccggtccctccactaagaaaattagtgaagcatcttccagtggtccctccactcacagctcaatcagtgagcaacaggacgaaggaaatgacgtaagccatgacgtctaatcccagggcccggtgaccaatcgaattagcttggcgcgtggaccgaagcttgcatgcctgcagtgcagcgtgacccggtcgtgcccctctctagagataatgagcattgcatgtctaagttataaaaaattaccacatattttttttgtcacacttgtttgaagtgcagtttatctatctttatacatatatttaaactttactctacgaataatataatctatagtactacaataatatcagtgttttagagaatcatataaatgaacagttagacatggtctaaaggacaattgagtattttgacaacaggactctacagttttatctttttagtgtgcatgtgttctcctttttttttgcaaatagcttcacctatataatacttcatccattttattagtacatccatttagggtttagggttaatggtttttatagactaatttttttagtacatctattttattctattttagcctctaaattaagaaaactaaaactctattttagtttttttatttaataatttagatataaaatagaataaaataaagtgactaaaaattaaacaaataccctttaagaaattaaaaaaactaaggaaacatttttcttgtttcgagtagataatgccagcctgttaaacgccgtcgacgagtctaacggacaccaaccagcgaaccagcagcgtcgcgtcgggccaagcgaagcagacggcacggcatctctgtcgctgcctctggacccctctcgagagttccgctccaccgttggacttgctccgctgtcggcatccagaaattgcgtggcggagcggcagacgtgagccggcacggcaggcggcctcctcctcctctcacggcaccggcagctacgggggattcctttcccaccgctccttcgctttcccttcctcgcccgccgtaataaatagacaccccctccacaccctctttccccaacctcgtgttgttcggagcgcacacacacacaaccagatctcccccaaatccacccgtcggcacctccgcttcaaggtacgccgctcgtcctcccccccccccctctctaccttctctagatcggcgttccggtccatgcatggttagggcccggtagttctacttctgttcatgtttgtgttagatccgtgtttgtgttagatccgtgctgctagcgttcgtacacggatgcgacctgtacgtcagacacgttctgattgctaacttgccagtgtttctctttggggaatcctgggatggctctagccgttccgcagacgggatcgatttcatgattttttttgtttcgttgcatagggtttggtttgcccttttcctttatttcaatatatgccgtgcacttgtttgtcgggtcatcttttcatgcttttttttgtcttggttgtgatgatgtggtctggttgggcggtcgttctagatcggagtagaattctgtttcaaactacctggtggatttattaattttggatctgtatgtgtgtgccatacatattcatagttacgaattgaagatgatggatggaaatatcgatctaggataggtatacatgttgatgcgggttttactgatgcatatacagagatgctttttgttcgcttggttgtgatgatgtggtgtggttgggcggtcgttcattcgttctagatcggagtagaatactgtttcaaactacctggtgtatttattaattttggaactgtatgtgtgtgtcatacatcttcatagttacgagtttaagatggatggaaatatcgatctaggataggtatacatgttgatgtgggttttactgatgcatatacatgatggcatatgcagcatctattcatatgctctaaccttgagtacctatctattataataaacaagtatgttttataattattttgatcttgatatacttggatgatggcatatgcagcagctatatgtggatttttttagcactgccttcatacgctatttatttgcttggtactgtttcttttgtcgatgctcaccctgttgtttggtgttacttctgcaggtcgactttaacttagcctaggatccatggccactgtgaacaactggctcgctttctccctctccccgcaggagctgccgccctcccagacgacggactccacactcatctcggccgccaccgccgaccatgtctccggcgatgtctgcttcaacatcccccaagattggagcatgaggggatcagagctttcggcgctcgtcgcggagccgaagctggaggacttcctcggcggcatctccttctccgagcagcatcacaaggccaactgcaacatgatacccagcactagcagcacagtttgctacgcgagctcaggtgctagcaccggctaccatcaccagctgtaccaccagcccaccagctcagcgctccacttcgcggactccgtaatggtggcttcctcggccggtgtccacgacggcggtgccatgctcagcgcggccgccgctaacggtgtcgctggcgctgccagtgccaacggcggcggcatcgggctgtccatgattaagaactggctgcggagccaaccggcgcccatgcagccgagggtggcggcggctgagggcgcgcaggggctctctttgtccatgaacatggcggggacgacccaaggcgctgctggcatgccacttctcgctggagagcgcgcacgggcgcccgagagtgtatcgacgtcagcacagggtggagccgtcgtcgtcacggcgccgaaggaggatagcggtggcagcggtgttgccggcgctctagtagccgtgagcacggacacgggtggcagcggcggcgcgtcggctgacaacacggcaaggaagacggtggacacgttcgggcagcgcacgtcgatttaccgtggcgtgacaaggcatagatggactgggagatatgaggcacatctttgggataacagttgcagaagggaagggcaaactcgtaagggtcgtcaagtctatttaggtggctatgataaagaggagaaagctgctagggcttatgatcttgctgctctgaagtactggggtgccacaacaacaacaaattttccagtgagtaactacgaaaaggagctcgaggacatgaagcacatgacaaggcaggagtttgtagcgtctctgagaaggaagagcagtggtttctccagaggtgcatccatttacaggggagtgactaggcatcaccaacatggaagatggcaagcacggattggacgagttgcagggaacaaggatctttacttgggcaccttcagcacccaggaggaggcagcggaggcgtacgacatcgcggcgatcaagttccgcggcctcaacgccgtcaccaacttcgacatgagccgctacgacgtgaagagcatcctggacagcagcgccctccccatcggcagcgccgccaagcgcctcaaggaggccgaggccgcagcgtccgcgcagcaccaccacgccggcgtggtgagctacgacgtcggccgcatcgcctcgcagctcggcgacggcggagccctggcggcggcgtacggcgcgcactaccacggcgccgcctggccgaccatcgcgttccagccgggcgccgccagcacaggcctgtaccacccgtacgcgcagcagccaatgcgcggcggcgggtggtgcaagcaggagcaggaccacgcggtgatcgcggccgcgcacagcctgcaggacctccaccacctgaacctgggcgcggccggcgcgcacgactttttctcggcagggcagcaggccgccgccgctgcgatgcacggcctgggtagcatcgacagtgcgtcgctcgagcacagcaccggctccaactccgtcgtctacaacggcggggtcggcgacagcaacggcgccagcgccgtcggcggcagtggcggtggctacatgatgccgatgagcgctgccggagcaaccactacatcggcaatggtgagccacgagcaggtgcatgcacgggcctacgacgaagccaagcaggctgctcagatggggtacgagagctacctggtgaacgcggagaacaatggtggcggaaggatgtctgcatgggggactgtcgtgtctgcagccgcggcggcagcagcaagcagcaacgacaacatggccgccgacgtcgggcatggcggcgcgcagctcttcagtgtctggaacgacacttaagcgtacctagtggtacctgacatcttatagtctgcaacctctcgtgtctgaattcctatctttatcaagtgttattgcttccacgactataggacagctttcgtcgaaagcttttgctcatgtgatctcgaaggattcatctagtctgatttttcgtgacttgtatcggttttattggattcatccaacatatatcaataaaaaatgagttgtgtttcctttcttcctagttcagttaaaattatttccctcctgcgcttgtgctgtaattgtctgtgtacctgttgtttgtgactgtgttagttcccttggatatgatttcgtatttgatatgtacatggagatagcttagcttcattattggagtatgaagttagtatgacatagtcactctcctggaaaattgacactgcaaaccatatttttattctgaaccacaaatcctagtcagtccgctggcatatgccgtccgtttgctgaatccagaacgtgggtttggagatgtacggctgagatgcctctatgcgaaggggatttcgtggtgaaacgagatgggagtagagcaacgcccgtggaagatgcttcaaacttccacacttttgagcaacgatcggcagtagtaaggtagacgatttcaagatcaaagcatatgaagataaacaacatcaacaacaaaatttgttggggttctatagagagaaacagagctacatacatacactgttttgtatctaccatctgagatgatgaaaagatgaaaaactaaagaatgccccggcgccaacgccaggacacgccgcgcgcgcgtcacccgagccatctcttgacccagccggcgctgtatatttacacacgttgcagcatcgatcaccacctgttcgatcgcgtcgccgtcaccggcgcgccgcgacttattgaactagtctagggcgcggctaacaacctagcttagattgccttgtctaaacccttaggctaacgcgccactctagaaggccgatctcccccgaacgcgccagatccgatatcgatgggccctggccgaagcttggtcacccggtccgggcctagaaggccgatctcccgggcacccagctttcttgtacaaagtggccgttaacggatcggccagaatggcccggaccgggttaccccgcggttcaaagccaatgactgttgttaggtccagtttctaaggacgaatcatccaatcactggttctttctgaacaaaacaaagagctatagagttacgttactgtagccgagacagagcctgcaatctggttatgccacatactaggttctttcttaaagttgactcactctatcctaagttctacttacaaggagctacaacaaattggtcataaccggagagcgttcaaggaggtaatatcccatcttactctgtagcaaggctacaaaaggagagctaaagaactaggctacaaaaagagagctaaagaactaactatctagcaagactacagagctatagtgtagagatttcataaccggtgagcgttcaaggatactttgaagagaagaggtaatatctcaactagcaagactacaaaaaaatggagatataaaactaactgtctaacaagactacagagctatagtagagatagatacgttcgacacttaagcatgagaattcgagctcggtaccctggttcacaaactcaatacaacacacagtggagtagggtattacgctccggcggcccgaaccactctaaatccttgtgtcctcgtgtgctcttccaccattaatgactgtaattgcagggacacgaagagttgtagcgcttttgccaacaagatccgctatatgctagtagagtggaacctgcacagcaacaagcatccaataatctgagaataagaattatgtgtggtgatggttctcatctctgcaactcgccattttcgcgagagaaccaaatccaagttggtgaagatcatgatttgggctcatgggctggcatagtagctattacctttgcaattgtggttcgaatctatccgatattctccttttcagggagagctaatgcttatgcttattgggtattttggtttgacactgcttcacgcccaaaaaaaggcaactatgtctgagttggatatggcccaaaaaaaggcagctatgtctgagttggatatggaagtcttctttcgtttagggtgaagtaagaccaagctcatgagcttattatcttaggtcggaacaaattagttgataggcatggcacatttatcaaattataatgattttaacagaaaagcaacacctctttttcagcagcaccagctttgcaagctgcaattgacactccaagcatagtatttgctccaaactcagcctgcatttcgcacaatatcatatctatttccatttggataaaatatattttccagaaatatgggaacagaatcaagatacagaaaaaagttgtggtagtagtggtaagtggaaacacaagtacagtgaaaagatagcattatttctgaacagtcaaattaaccgaaataagtagtatcacatactgcccctaaattgactacacccaatgtaaagaattgcttgagcatattgagccatcagttgtttgtttgtgtaacggatttgacaatgcagagttcaggagcaaaaaaccgcaaaggagagaaagagggaaaggatctcctagtatcccaccttgtggcgcgccctgtcaagtgcatgatggcctggtcgatctgcgtctgctgctgcggttccatcccaacgagtgcctccgacaccttgtcgttgatcacccgcaccgcgtaggcgacccccctggcgaggaacttccgcctctcggaggccccggccgcgtcggcggcggcgccctcgagcgcgcccacgctagccgtagatgctcggtgcacggccttgttggtgtgcaactcgacctcaacggccggtgcgctacgcccgtcaaggatctggcgcgcccgcaccctcgtgatcacggtgggcgcctcccgcctcatgtggccgacgatgaaaagcgccgggttaggggccttggcgcgcaccgccgtattcagggcctcctcgctcttgcgcgagagcaggtgcttccccaggtactcctgcactgacaaggctgccacagcggtggaatttgtcctcacgacttcgccacgtcgtcctcacctccctggcttcccacgactccgccgtatcgaggtgctcggtgggtcgtcttaatccgaagtccgaactaggaagacgagacagagaggtctgaggaatgggcctcgtttgatgttgagctgaattatttttccagcataagcccaggtcttggtccatgaacaaaattactagaaacccagcccagtactacgatctaaaagagggactgccactggatagctctctctagcattctccacgctccaatacagcggcgtcgtgtctatccgggtctatccgcgaacacgtgagaactctccagaaactgctttctcctccacttcatctctctcgctttccctctataaaaagaccccttctaggaattgagggagacagcaagcaccaagcagcgatccgaagctcaatcaattcactcaaacctcttccccaaatcttcgattagatcttcgttgacaagaagactagaaccgaacctgacatgtccaacctgctcacggttcaccagaaccttccggctcttccagtggacgcgacgtccgatgaagtcaggaagaacctcatggacatgttccgcgacaggcaagcgttcagcgagcacacctggaagatgctgctctccgtctgccgctcctgggctgcatggtgcaagctgaacaacaggaagtggttccccgctgagcccgaggacgtgagggattaccttctgtacctgcaagcgcgaggtttgtttctgcttctacctttgatatatatataataattatcattaattagtagtaatataatatttcaaatatttttttcaaaataaaagaatgtagtatatagcaattgcttttctgtagtttataagtgtgtatattttaatttataacttttctaatatatgaccaaaacatggtgatgcctaggtctggcagtgaagaccatccagcaacaccttggacaactgaacatgcttcacaggcgctccggcctcccgcgccccagcgactcgaacgccgtgagcctcgtcatgcgccgcatcaggaaggaaaacgtcgatgccggcgaaagggcaaagcaggccctcgcgttcgagaggaccgatttcgaccaggtccgcagcctgatggagaacagcgacaggtgccaggacattaggaacctggcgttcctcggaattgcatacaacacgctcctcaggatcgcggaaattgcccgcattcgcgtgaaggacattagccgcaccgacggcggcaggatgcttatccacattggcaggaccaagacgctcgtttccaccgcaggcgtcgaaaaggccctcagcctcggagtgaccaagctcgtcgaacgctggatctccgtgtccggcgtcgcggacgacccaaacaactacctcttctgccgcgtccgcaagaacggggtggctgcccctagcgccaccagccaactcagcacgagggccttggaaggtattttcgaggccacccaccgcctgatctacggcgcgaaggatgacagcggtcaacgctacctcgcatggtccgggcactccgcccgcgttggagctgctagggacatggcccgcgccggtgtttccatccccgaaatcatgcaggcgggtggatggacgaacgtgaacattgtcatgaactacattcgcaaccttgacagcgagacgggcgcaatggttcgcctcctggaagatggtgactgaggtacccaacctagacttgtccatcttctggattggccaacttaattaatgtatgaaataaaaggatgcacacatagtgacatgctaatcactataatgtgggcatcaaagttgtgtgttatgtgtaattactagttatctgaataaaagagaaagagatcatccatatttcttatcctaaatgaatgtcacgtgtctttataattctttgatgaaccagatgcatttcattaaccaaatccatatacatataaatattaatcatatataattaatatcaattgggttagcaaaacaaatctagtctaggtgtgttttgcgatccgatatcgaattggccacggtaccagctgctgctgttctagggttcacaagtctgcctatttgtcttccccaatggagctatggttgtctggtctggtccttggtcgtgtcccgtttcattgtgtactatttacctgtaatgtgtatccttaagtctggtttgatggtgtctgaaacgttttgctgtggtagagcagcatggaagaactataatgaataagtgatccctaatcattgtgtccaaattttgcttctgctatacccttttgtgctgtttcttatgttttgcttaaaaatttgatctgacaaacaaatttgtctaaattatgctcttgttctgactgtgtactgtacacatttgtattgctaccggtttggcacatagttttctctttgattgcagatcaaacccttctgattgcagattgcttggctatggctgatgtgctcactgttcttctttagcttgtatattgctgatggtggcttggctacggctgaaaaagttgctgctgcgccgacttggcaactgttgctccagtaatgctttgtcctctcttcctagccgccgacttggcacttggcagctgttgctcctgtaatgcgttgttatctcttatctcttgagatgtactatgattttgaggctgtttgacttgtgccagattgccagtgctgatgctatattatctcaggtttttatgctagtatatgttttactgtgtgctgcctgtgtcgagttacgtaatctattgaaccgctatgcgtgttgatgccctgttgttgcttgccagattgatgcccctgttgcttgcagcttgcaagctgtagtgaaatcctaaaattccaaaccaaatctattctgaacttttgaagatctgtgatgtccggaagaaaagattcaaacagataaacgggactctccagaatctataaaataaatgatcgacaaacgctttgctttggtaggcttcaagcttggtcacccggtccgggcctagaaggccagcttcggccgccccgggcaactttattatacaaagttgatagataaatcagatatctggttcctaaggacccggcggaccgattaaactgattcggtccgacgcgttacctaataacttcgtatagcatacattatacgaagttattagctaactaactagtaagcttaagccatgggtcgacggatccgttaactagcgtggcatttggcaccgccgcacactatgcgagctaggagtgctagtttacagatgaaactatgaaaccaagaaaacacaattgtccgtagctagcgcgtggcgtcgtgtcaagcttcacacagtatcttcgttcttcactataaatcgcgcctgttgttcgtgagacccaccaccgtggataacagtcccctaataataagcgatcaacagcactgctgatggctgaacaccgaggcgccgccgcgcgtaaccatccgccggagcagcccgtcgtgccggcgaacgacgccttccccgaccgcgcccagcagctctgcctcgacgccgggcgcgcgctcgcgatgtgcggcgtgctcgtcgccgtccctcccgcattttacgcgtcgacgtcgcggacgacaccgcacttgccttcgtcggcttcgtcctctggatcatcggtgcgtggctgtgcctcctggcgctcacgcccttggctccacgggcggtgagggcgggcggggccgccgccagcaccttgctgatcaggtgcctgtccctttcatgaactactagcgcccgcgcccgcggccgccgggcacaagagaacacatcgatgttcgctgcgtacgtcagcaataaggcactctttgtcagtagtcgagtgcatatgttgggtgtttgccctgggagatttcaagtgttgtggccattatcccgcaggataaaaaatcggcggcttttggattgatacggaaaataacgatgtttcatgctcgtgttgtgtgtgtgacatcttgtcagccaagtttttaaccgttgctactccccctctgtgggctcagtgtgtggaccggaatacgtcgtacataggccgtagcctaagcccaatatgccgtttttcaggttggcctgtgtgacgacaagcgggtctcaaaagcccatcacgcaactggcctgcaattattggaggagagcgcgtcgagttggttccagaggctgcgtggtggggccggactctgcgacgacctctcgttcgcgtccgatttggttgccgtgagccgtgacgtaacgcctccttccgttcctccctatataagttccacccccgggtccggtttccccaagccccagtgacccccgatcccgatcgcgaaatctccgcacccgccggcaagggaccgaagcaagcctctctcccgaccgtcgcatcaaggtacgcgtccgctcgatctgtcctcttccttctcgatttgacttgctgtggtgcccgatcacgggatcagaatcgcaccagtgtagatttcgcatgttctaagatgtgttagtttccaggctaatccagttctcttgacgcccgatccgatcgagctccgtgtttatttcagcctaatcgtagtattcccctaaaatttcctcattagggggttcgcaagattgttggtcgacaggttcacttatgctcgatcgcttacttttagtcgattcatgctgcgtactattgttgccccccgtggttttatcttttctcgtgtgaaatccagtagatatagtagatatcgtagcattaggttttaattcaatcgattgattattgtatcatcaaaattgagaagttcgaatcatgcctatcatgctgcctcaaccgaaatcctgtatattgaagtttcaattcaattgattgatcattcattagattcaaccaaaatctagaaggttagatgacgcatgtcatgctgcctgcgtagtttacctttgatctgtttatgattaccttatcagtaggatatttgtgattttgggaagtagcactaactgattcatgctgacatgatgttccctttcagattatactgttgagtcctatctaattgatgctttgtatgctatatgaatacgtcatggtaaattagcagttaattagcatattagcaattgggcgtacctcatcaggattgctcttgtagatgtgtgtggtgatgtttcttgttcaattcatgttctgctttaaaagtatgtgttctctgtttgttaattaagattcatggttataatgatttggacctaattaatcagggttgcccttttagatgcgtggttacttgttgagttcatttttttcctgctatagttgtatgcgtttgttcattcatggttagatttgatttgtttcttctctattccatgccttccatatacttcaattgtagcttaacatgagatttctgtatatgcaggtcgaccgccggggatccacacgacaccatggcccagtccaagcacggcctgaccaaggagatgaccatgaagtaccgcatggagggctgcgtggacggccacaagttcgtgatcaccggcgagggcatcggctaccccttcaagggcaagcaggccatcaacctgtgcgtggtggagggcggccccttgcccttcgccgaggacatcttgtccgccgccttcatgtacggcaaccgcgtgttcaccgagtacccccaggacatcgtcgactacttcaagaactcctgccccgccggctacacctgggaccgctccttcctgttcgaggacggcgccgtgtgcatctgcaacgccgacatcaccgtgagcgtggaggagaactgcatgtaccacgagtccaagttctacggcgtgaacttccccgccgacggccccgtgatgaagaagatgaccgacaactgggagccctcctgcgagaagatcatccccgtgcccaagcagggcatcttgaagggcgacgtgagcatgtacctgctgctgaaggacggtggccgcttgcgctgccagttcgacaccgtgtacaaggccaagtccgtgccccgcaagatgcccgactggcacttcatccagcacaagctgacccgcgaggaccgcagcgacgccaagaaccagaagtggcacctgaccgagcacgccatcgcctccggctccgccttgccctccggactcagatctcgatagagtcaacctagacttgtccatcttctggattggccaacttaattaatgtatgaaataaaaggatgcacacatagtgacatgctaatcactataatgtgggcatcaaagttgtgtgttatgtgtaattactagttatctgaataaaagagaaagagatcatccatatttcttatcctaaatgaatgtcacgtgtctttataattctttgatgaaccagatgcatttcattaaccaaatccatatacatataaatattaatcatatataattaatatcaattgggttagcaaaacaaatctagtctaggtgtgttttgcgaattgcggcgcccttactttaacgcctctaaccaacacccctttatctttataaggaacaataaacagaatttgccccactgttctaaatcacctaataatatccccagctaaaaacaataaaggtttcctagaattaagacaagcatgactgttcctccaggagggtttggaacattgttgcagtcttgcagatacgggcgaagggtgagaaacagagcggagggctggaggtgacctcggtagtcgacgccggagttgagcttgacaacgacggggcggcccctgatggacttgaggaagtccgatggcgtcttcaccgtcccgccggcgcccgaggcgggcctgtcgctgccgccgccgccgctgctcatcttgcgcgctgtgcccccggcggtgtccctgtgttgcggatcgcgggtgggccaggtggatgcgagggcgacccgtttggactccggccggagccgccggatccctggtcggtgtcagtgccgtttactctgggccccacgtgtcagtaccgtctgtagatgacaacaacccgtcgtccacagtcatgtccaaaatatcctttcttcttttttttcgattcggatatctatcttccttttttttttccaaaaatcttcttgacgcaccagcgcgcacgtttgtggtaaacgccgacacgtcggtcccacgtcgatagaccccacccaccagtgagtagcgtgtacgtattcgggggtgacggacgtgtcgccgtcgtcttgctagtcccattcccatctgagccacacatctctgaacaaaaaaaaggagggaggcctccacgcacatccccctccgtgccacccgccccaaaccctcgcgccgcctccgagacagccgccgcaaccatggccaccgccgccgccgcgtctaccgcgctcactggcgccactaccgctgcgcccaaggcgaggcgccgggcgcacctcctggccacccgccgcgccctcgccgcgcccatcaggtgctcagcggcgtcacccgccatgccgatggctcccccggccaccccgctccggccgtggggccccaccgagccccgcaagggtgctgacatcctcgtcgagtccctcgagcgctgcggcgtccgcgacgtcttcgcctaccccggcggcgcgtccatggagatccaccaggcactcacccgctcccccgtcatcgccaaccacctcttccgccacgagcaaggggaggcctttgccgcctccggctacgcgcgctcctcgggccgcgtcggcgtctgcatcgccacctccggccccggcgccaccaacctagtctccgcgctcgccgacgcgctgctcgattccgtccccatggtcgccatcacgggacaggtggcgcgacgcatgattggcaccgacgccttccaggagacgcccatcgtcgaggtcacccgctccatcaccaagcacaactacctggtcctcgacgtcgacgacatcccccgcgtcgtgcaggaggctttcttcctcgcctcctctggtcgaccagggccggtgcttgtcgacatccccaaggacatccagcagcagatggcggtgcctgtctgggacaagcccatgagtctgcctgggtacattgcgcgccttcccaagccccctgcgactgagttgcttgagcaggtgctgcgtcttgttggtgaatcgcggcgccctgttctttatgtgggcggtggctgcgcagcatctggtgaggagttgcgacgctttgtggagctgactggaatcccggtcacaactactcttatgggcctcggcaacttccccagcgacgacccactgtctctgcgcatgctaggtatgcatgggacggtgtatgcaaattatgcagtggataaggccgatctgttgcttgcacttggtgtgcggtttgatgatcgcgtgacagggaagattgaggcttttgcaagcagggctaagattgtgcacgttgatattgatccggctgagattggcaagaacaagcagccacatgtgtccatctgtgcagatgttaagcttgctttgcagggcatgaatgctcttcttgaaggaagcacatcaaagaagagctttgactttggctcatggaacgatgagttggatcagcagaagagggaattcccccttgggtataaaacatctaatgaggagatccagccacaatatgctattcaggttcttgatgagctgacgaaaggcgaggccatcatcggcacaggtgttgggcagcaccagatgtgggcggcacagtactacacttacaagcggccaaggcagtggttgtcttcagctggtcttggggctatgggatttggtttgccggctgctgctggtgcttctgtggcaaacccaggtgtcactgttgttgacatcgatggagatggtagctttctcatgaacgttcaggagctagctatgatccgaattgagaacctcccagtgaaggtctttgtgctaaacaaccagcacctggggatggtggtgcagttggaggacaggttctataaggccaacagagcgcacacatacttgggaaacccagagaatgaaagtgagatatatccagatttcgtgacgatcgccaaagggttcaacattccagcggtccgtgtgacaaagaagaacgaagtccgcgcagcgataaagaagatgctcgagactccagggccgtacctcttggatataatcgtcccacaccaggagcatgtgttgcctatgatccctagtggtggggctttcaaggatatgatcctggatggtgatggcaggactgtgtactgactagctagtcagttaacagatctgccagatcctcggtgtacaaataacccgtcttatcctatgagacgggccggcgtcagtgtgttctggaggaatttttatgtcagagcctttttctttgtgtgcttgatgtagatgccaagggaagcttattggctgttgaagcttgatgcaaaataaattatggaactctgttttttgtttatctaataataactagcaaatatgcttccattgcattgaaactaacagccttttgtgtttccaagttttattttgtgacaatgtcatctatttcaattagttgtggaatcggaaacttgcaggactaacttggaaactccaatccctcagcatcctggactttttcctggtgtaatccatgtagatattattttaatcatcattttagttctggaggtttttccatctccggttttgctcccctttcttcaaaaaaaaaaaaaaaatgccgtaggcgccgcaacgcccacctgttgttcaaactcatgggcacgagtggctcgaagattttatacaacaattgctgtagtttcaccgttgctggtgaagaagcatttttttaaaaaaatatagtggtattcattttaattagtttagttgtgcagcgagcaaaatttggacatgctctgctcggaatctgatcgacctagacacagattagcagcagtagctttgtcatctgttccaagagttgcgatctgatagaagaaaaaaaaaccttcccttcaatgtaaaaccgaaactaacaagaaagaagcacagtgccgtttaggcaagtatggagtacgtattaagcatgtagaaggccatgcatgaaccactaacaagaaagaagcgcagtgccattcaggcaagcataagcatgtagattggcatgcatgaacaactaacagtagatcgtctctggtctgattagaagttttttgggaagccaagaaatcatgtacaactggttccatctcaaattccgtggcaaaaagaggcctaagcaacatacctcgagtagatcacattcaagcttggtcacccggtccgtcaatattctgattccgatgacttcgtaggttcctagctcaagccgctcgtgtccaagcgtcacttacgattagctaatgattacggcatctaggaccgactagtggcgcgccgactagctagctaaggtaccgagctcgaattcattccgattaatcgtggcctcttgctcttcaggatgaagagctatgtttaaacgtgcaagcgctactagacaattcagtacattaaaaacgtccgcaatgtgttattaagttgtctaagcgtcaatttgtttacaccacaatatatcctgcca

SEQ ID NO: 282 - DNA, 24852 bp, Artificial Sequence
  PHP99716
gtttacccgccaatatatcctgtcaaacactgatagtttaaactgaaggcgggaaacgacaatctgatcatgagcggagaattaagggagtcacgttatgacccccgccgatgacgcgggacaagccgttttacgtttggaactgacagaaccgcaacgttgaaggagccactcagcaagctggtacgattgtaatacgactcactatagggcgaattgagcgctgtttaaacgctcttcaactggaagagcggttacgctgtttaaacgctcttcaactggaagagcggttactaccggttcactagctagctgctaatcgagctagttaccctatgaggtgacatgaagcgctcacggttactatgacggttagcttcacgactgttggtggcagtagcgtacgacttagctatagttccggacttacccttaagcgatttaaatctgcggttaccgaattcgagctcggtacctagtacccttgtacttttggtttcacctgcatagagaaaacccacaagaatatgacagtctgatttgtcagtctcattctcaagcaacatttctctatccgttactttcatggtgaataacacaatccatcatcaatactttgtgttactcagaaactgaaagttattccgagtcttgcatatctttggacctactcgtttttctaccattattgctgattgttaagctctcgctacttgaatcggcattgttggagtgggaaggttcaaaaaattggagttatgactagttgtctctttctatgtacgatggagaaaatgaataaacaactgagaaaatggctcttgtttagttgatgatgctcttaagctttccactggttgccatatatgatttgggcatttcactttgatcttaatgggccttgtaaagcccaagactcatgattatctttagttgatgctcttaattaggtgtgggcaaataattcaaactgtatgtacccgaccaaaaccaaagcaaaaataatcgaaccaaaccgaaaatttaaaaataaccgaatgaaaactaaatcctataactgaaagaactgaaaccgaatcaaaatatttaatgtaaccaaaaatatccgaaatataattatattgtcaaaaatattaataatttctagattaaataattaaaaatacttaaaaatttatataaaatagtaaaaatactcgaaaataaccacaaatattcaaaaacaaccgaaatatcccaaaatattcaaagcaaaataaccgaatggataccaaattttaaaaccgaaaaaactggaacaaaaccaaaatcgaaccaaaatttcaaaaatcgaataaatactaaactttagaacaaaaaaaaacgataaccgaatgtatacgaaccaaagccgaattagataaccgaacgtccaggactactcttaatctttccgccacttatgatttgggctattactttgtttataatgagccttttcaagctcaagttcatgattgtccgtgagatgagaaactgacttgttggattcgaaaccctagctagtattggttaatacttaatacataaatgacctgcattgacatcatcatccaagaaaataaaaattgtatgcttgagatatttagttttcctagctaggttttctttattttagtaccgaatctttaggtgtgccacgttaatttagacccattttttcatacttaccaactgagtctagtttaatcatgactataatcgtataaaatgattcagtcgacgtcattgcgaacgtatataaaatcatccaaattgacgtcattccaaagaggtaagcatgcttatctaagagtccgagcatactaaacaagacgacattttatttgcactccaaatcaaattttgtattgcctaaagaaaaacaatcaaactcaagtttcttaaaattaatttcattcaaactaatcactttcaatatctcacatattattcatgccatttctatttgtctaaacatgatttaaaaaaaaaagtaaaatacaaagattactatgcaaaaactctataaaaaaaaattcaaatttcttatttatttgtgacatcaaattttcaaaataatttttttaattatcggttgatccggtcagtcgataaaaacataaactttcagcgaccgttaaaactttcctactaccgatttagagaaaatcttagcttgaaacgtaattgtaacctgccttcatgcaagtcgcaagatatgtcatcctaagttgtatatgttttctcaaaagatgtatttacttgagaaaatacgtttcaacgttgatggacaaccaattaagaatcaagcacctttcgtaatcaatttaggcttatcgtctaaggtatactgatttacgacagttgactagacttataaggaacaaaataatagaatagtttctaaacacttcacctaatcatagagactaagatggtaattcgtaaacgacaaagcctagtgacactgtccattgtaaaattccacatcatattagtattaaacatatacatgtagtttcctgaacacatgtagtatcaaacacacttcgtggcttcttcctcgaaacctgcggccgcgctatagttccggacttacccttaagataacttcgtatagcatacattatacgaagttatgggcccacgcgtgaagagcggttaccagagctggtcacctttgtccaccaagatggaactgtcttcggccagaatggccatctggattcagcaggcctagaaggccatttatcgctatcaactttgtatagaaaagttgggccgaattcgagctcggtacggccagaatggcccggaccgaagcttgccgggcggcccgaatgtacacctatagccatgtctagcgagccgacccgaggcacgacccatttaatagtgtttaggccaacccgtcataagtgtcgtgtggtgcttgggccgtacctcggcccgtagtgctggcccggcccgacacattattttttattttaaaaaaatcatatatacatatgtacaatttatatttaatattataaatatctgaacatgatgttgtactggttagatagctttgttcagtgtcttctacccttcttttagggtgtggattcaaactccacctcctacaggcccgacacgtttaattttgggtctggcctggcccaatattaaatttgggtcatgccgtgccgacccacgagttgacccctcggcccacggtccggcccatattcagctaaacgtgccgggctttaaacgggcggcccaaaaatagtaaaggcccgaaatacaaatttgggcccaaaaacaaaatcgagcctataatacataattgagcccagaatacagaatcgagcccgaaatacacaaaagcctaaaattggaaacatacaatcaaatataatcagcaaaccaacaaaagagaagacaaacaatttttgaccaaaacaaacttaatattattagagctgtgctcttgtggctgcgcttgtggcatatagtctccgtgccggataaccctgccctcacgacggcggcaggtatgaccagcagctgggttgctaggcacgagcgtaaggtggcggcggcgcatacgctggagctcgtgggaggaagggtggcacgggcgcagggcgcatgccacgcaggcggcgcacgcgctggaacctggagctcgtgggaggaagggcggcaggggcgcagggcgtaggccgcgcagccacgcagggcgcgtcgcacactctcgctgtctcgcgctggagcctagaactgggggcctaggaggctgggacggcggtcggacgggacacgggagtaagagcgactcggcattttaggttttttgagcaacagggcaagacaaagctaaatggaaatgggcctcgccttcgccttaggctcgtggacaacttatgcgctgccgctgcctgagctgagcctgactgcctgaggaccaccgactcgccaagtggtgcgctgccgctcggttcgggcctttacgtgccggttaacgggccatttcaggcctgcttaaacgggccgggctcgtgcccgcccgtgagcctcggcctcggcccaagcatggcccgatacatcagaccaggccgatccgacccaaaataattttatgtcgtatcgtgtttggatcgtgtttttttttcgtgcttcgtgtcagcctattaaacccggaccaaatgtacacctacagtgccgacttccttctcccgttctccgctcctccgatcgacgatggccatcgctcaagctcagctgggccgacacaatcacacaagggtcggtccacccacattcgtacgcgtgcttgttgtctctgtcagccatcaactctccagtgagctgcgagcctacaaggctgtgggcagtgccagcctcaacctcgacctcccccagtcccccaccgaccaccggcctcctttcccgcaggcacgggtgcacggcacgcggtttccactcgcttcgtccgcgttcggatcgccctcaggtcaaccaccactcctcccctctgctcctctcagcatctcgcgcttcagatctcgcccaccgatctggaactggaattccctcccgatctgtatgtatctcacgcacgcttgctcgcgttcttggctttgctcccacctctctctagcagagtaacagtctagcagagcaagccccgggggatctcgactctagaggatcgctcaggaaggccgctgagatagaggcatggcggccaatgcgggcggcggtggagcgggaggaggcagcggcagcggcagcgtggctgcgccggcggtgtgccgccccagcggctcgcggtggacgccgacgccggagcagatcaggatgctgaaggagctctactacggctgcggcatccggtcgcccagctcggagcagatccagcgcatcaccgccatgctgcggcagcacggcaagatcgagggcaagaacgtcttctactggttccagaaccacaaggcccgcgagcgccagaagcgccgcctcaccagcctcgacgtcaacgtgcccgccgccggcgcggccgacgccaccaccagccaactcggcgtcctctcgctgtcgtcgccgccgccttcaggcgcggcgcctccctcgcccaccctcggcttctacgccgccggcaatggcggcggatcggctgtgctgctggacacgagttccgactggggcagcagcggcgctgccatggccaccgagacatgcttcctgcaggactacatgggcgtgacggacacgggcagctcgtcgcagtggccacgcttctcgtcgtcggacacgataatggcggcggccgcggcgcgggcggcgacgacgcgggcgcccgagacgctccctctcttcccgacctgcggcgacgacggcggcagcggtagcagcagctacttgccgttctggggtgccgcgtccacaactgccggcgccacttcttccgttgcgatccagcagcaacaccagctgcaggagcagtacagcttttacagcaacagcaacagcacccagctggccggcaccggcaaccaagacgtatcggcaacagcagcagcagccgccgccctggagctgagcctcagctcatggtgctccccttaccctgctgcagggagtatgtgagagcaacgcgagctgccactgctcttcactgatgtctctggaatggaaggaggaggaagtgagcatagcgttggtgcgttgctgtcaagggcgaattcacatggttaacctagacttgtccatcttctggattggccaacttaattaatgtatgaaataaaaggatgcacacatagtgacatgctaatcactataatgtgggcatcaaagttgtgtgttatgtgtaattactagttatctgaataaaagagaaagagatcatccatatttcttatcctaaatgaatgtcacgtgtctttataattctttgatgaaccagatgcatttcattaaccaaatccatatacatataaatattaatcatatataattaatatcaattgggttagcaaaacaaatctagtctaggtgtgttttgcgaatgcggccgccaccgcggtggagctcgaattccggtccgggcctagaaggccagcttcaagtttgtacaaaaaagcaggctccggccagaatctcactgactagctaaacagcggccgcatcgagcagctggcttgtggggaccagacaaaaaaggaatggtgcagaattgttaggcgcacctaccaaaagcatctttgcctttattgcaaagataaagcagattcctctagtacaagtggggaacaaaataacgtggaaaagagctgtcctgacagcccactcactaatgcgtatgacgaacgcagtgacgaccacaaaactcgagcaacgagatcatgagccaatcaaagaggagtgatgtagacctaaagcaataatggagccatgacgtaagggcttacgcccatacgaaataattaaaggctgatgtgacctgtcggtctctcagaacctttactttttatgtttggcgtgtatttttaaatttccacggcaatgacgatgtgaccgtcgacccactaaaacattgctttgtcaaaagctaaaaaagatgatgcccgacagccacttgtgtgaagcatgagaagccggtccctccactaagaaaattagtgaagcatcttccagtggtccctccactcacagctcaatcagtgagcaacaggacgaaggaaatgacgtaagccatgacgtctaatcccagggcccggtgaccaatcgaattagcttggcgcgtggaccgaagcttgcatgcctgcagtgcagcgtgacccggtcgtgcccctctctagagataatgagcattgcatgtctaagttataaaaaattaccacatattttttttgtcacacttgtttgaagtgcagtttatctatctttatacatatatttaaactttactctacgaataatataatctatagtactacaataatatcagtgttttagagaatcatataaatgaacagttagacatggtctaaaggacaattgagtattttgacaacaggactctacagttttatctttttagtgtgcatgtgttctcctttttttttgcaaatagcttcacctatataatacttcatccattttattagtacatccatttagggtttagggttaatggtttttatagactaatttttttagtacatctattttattctattttagcctctaaattaagaaaactaaaactctattttagtttttttatttaataatttagatataaaatagaataaaataaagtgactaaaaattaaacaaataccctttaagaaattaaaaaaactaaggaaacatttttcttgtttcgagtagataatgccagcctgttaaacgccgtcgacgagtctaacggacaccaaccagcgaaccagcagcgtcgcgtcgggccaagcgaagcagacggcacggcatctctgtcgctgcctctggacccctctcgagagttccgctccaccgttggacttgctccgctgtcggcatccagaaattgcgtggcggagcggcagacgtgagccggcacggcaggcggcctcctcctcctctcacggcaccggcagctacgggggattcctttcccaccgctccttcgctttcccttcctcgcccgccgtaataaatagacaccccctccacaccctctttccccaacctcgtgttgttcggagcgcacacacacacaaccagatctcccccaaatccacccgtcggcacctccgcttcaaggtacgccgctcgtcctcccccccccccctctctaccttctctagatcggcgttccggtccatgcatggttagggcccggtagttctacttctgttcatgtttgtgttagatccgtgtttgtgttagatccgtgctgctagcgttcgtacacggatgcgacctgtacgtcagacacgttctgattgctaacttgccagtgtttctctttggggaatcctgggatggctctagccgttccgcagacgggatcgatttcatgattttttttgtttcgttgcatagggtttggtttgcccttttcctttatttcaatatatgccgtgcacttgtttgtcgggtcatcttttcatgcttttttttgtcttggttgtgatgatgtggtctggttgggcggtcgttctagatcggagtagaattctgtttcaaactacctggtggatttattaattttggatctgtatgtgtgtgccatacatattcatagttacgaattgaagatgatggatggaaatatcgatctaggataggtatacatgttgatgcgggttttactgatgcatatacagagatgctttttgttcgcttggttgtgatgatgtggtgtggttgggcggtcgttcattcgttctagatcggagtagaatactgtttcaaactacctggtgtatttattaattttggaactgtatgtgtgtgtcatacatcttcatagttacgagtttaagatggatggaaatatcgatctaggataggtatacatgttgatgtgggttttactgatgcatatacatgatggcatatgcagcatctattcatatgctctaaccttgagtacctatctattataataaacaagtatgttttataattattttgatcttgatatacttggatgatggcatatgcagcagctatatgtggatttttttagcactgccttcatacgctatttatttgcttggtactgtttcttttgtcgatgctcaccctgttgtttggtgttacttctgcaggtcgactttaacttagcctaggatccatggccactgtgaacaactggctcgctttctccctctccccgcaggagctgccgccctcccagacgacggactccacactcatctcggccgccaccgccgaccatgtctccggcgatgtctgcttcaacatcccccaagattggagcatgaggggatcagagctttcggcgctcgtcgcggagccgaagctggaggacttcctcggcggcatctccttctccgagcagcatcacaaggccaactgcaacatgatacccagcactagcagcacagtttgctacgcgagctcaggtgctagcaccggctaccatcaccagctgtaccaccagcccaccagctcagcgctccacttcgcggactccgtaatggtggcttcctcggccggtgtccacgacggcggtgccatgctcagcgcggccgccgctaacggtgtcgctggcgctgccagtgccaacggcggcggcatcgggctgtccatgattaagaactggctgcggagccaaccggcgcccatgcagccgagggtggcggcggctgagggcgcgcaggggctctctttgtccatgaacatggcggggacgacccaaggcgctgctggcatgccacttctcgctggagagcgcgcacgggcgcccgagagtgtatcgacgtcagcacagggtggagccgtcgtcgtcacggcgccgaaggaggatagcggtggcagcggtgttgccggcgctctagtagccgtgagcacggacacgggtggcagcggcggcgcgtcggctgacaacacggcaaggaagacggtggacacgttcgggcagcgcacgtcgatttaccgtggcgtgacaaggcatagatggactgggagatatgaggcacatctttgggataacagttgcagaagggaagggcaaactcgtaagggtcgtcaagtctatttaggtggctatgataaagaggagaaagctgctagggcttatgatcttgctgctctgaagtactggggtgccacaacaacaacaaattttccagtgagtaactacgaaaaggagctcgaggacatgaagcacatgacaaggcaggagtttgtagcgtctctgagaaggaagagcagtggtttctccagaggtgcatccatttacaggggagtgactaggcatcaccaacatggaagatggcaagcacggattggacgagttgcagggaacaaggatctttacttgggcaccttcagcacccaggaggaggcagcggaggcgtacgacatcgcggcgatcaagttccgcggcctcaacgccgtcaccaacttcgacatgagccgctacgacgtgaagagcatcctggacagcagcgccctccccatcggcagcgccgccaagcgcctcaaggaggccgaggccgcagcgtccgcgcagcaccaccacgccggcgtggtgagctacgacgtcggccgcatcgcctcgcagctcggcgacggcggagccctggcggcggcgtacggcgcgcactaccacggcgccgcctggccgaccatcgcgttccagccgggcgccgccagcacaggcctgtaccacccgtacgcgcagcagccaatgcgcggcggcgggtggtgcaagcaggagcaggaccacgcggtgatcgcggccgcgcacagcctgcaggacctccaccacctgaacctgggcgcggccggcgcgcacgactttttctcggcagggcagcaggccgccgccgctgcgatgcacggcctgggtagcatcgacagtgcgtcgctcgagcacagcaccggctccaactccgtcgtctacaacggcggggtcggcgacagcaacggcgccagcgccgtcggcggcagtggcggtggctacatgatgccgatgagcgctgccggagcaaccactacatcggcaatggtgagccacgagcaggtgcatgcacgggcctacgacgaagccaagcaggctgctcagatggggtacgagagctacctggtgaacgcggagaacaatggtggcggaaggatgtctgcatgggggactgtcgtgtctgcagccgcggcggcagcagcaagcagcaacgacaacatggccgccgacgtcgggcatggcggcgcgcagctcttcagtgtctggaacgacacttaagcgtacctagtggtacctgacatcttatagtctgcaacctctcgtgtctgaattcctatctttatcaagtgttattgcttccacgactataggacagctttcgtcgaaagcttttgctcatgtgatctcgaaggattcatctagtctgatttttcgtgacttgtatcggttttattggattcatccaacatatatcaataaaaaatgagttgtgtttcctttcttcctagttcagttaaaattatttccctcctgcgcttgtgctgtaattgtctgtgtacctgttgtttgtgactgtgttagttcccttggatatgatttcgtatttgatatgtacatggagatagcttagcttcattattggagtatgaagttagtatgacatagtcactctcctggaaaattgacactgcaaaccatatttttattctgaaccacaaatcctagtcagtccgctggcatatgccgtccgtttgctgaatccagaacgtgggtttggagatgtacggctgagatgcctctatgcgaaggggatttcgtggtgaaacgagatgggagtagagcaacgcccgtggaagatgcttcaaacttccacacttttgagcaacgatcggcagtagtaaggtagacgatttcaagatcaaagcatatgaagataaacaacatcaacaacaaaatttgttggggttctatagagagaaacagagctacatacatacactgttttgtatctaccatctgagatgatgaaaagatgaaaaactaaagaatgccccggcgccaacgccaggacacgccgcgcgcgcgtcacccgagccatctcttgacccagccggcgctgtatatttacacacgttgcagcatcgatcaccacctgttcgatcgcgtcgccgtcaccggcgcgccgcgacttattgaactagtctagggcgcggctaacaacctagcttagattgccttgtctaaacccttaggctaacgcgccactctagaaggccgatctcccccgaacgcgccagatccgatatcgatgggccctggccgaagcttggtcacccggtccgggcctagaaggccgatctcccgggcacccagctttcttgtacaaagtggccgttaacggatcggccagaatggcccggaccgggttaccccgcggttcaaagccaatgactgttgttaggtccagtttctaaggacgaatcatccaatcactggttctttctgaacaaaacaaagagctatagagttacgttactgtagccgagacagagcctgcaatctggttatgccacatactaggttctttcttaaagttgactcactctatcctaagttctacttacaaggagctacaacaaattggtcataaccggagagcgttcaaggaggtaatatcccatcttactctgtagcaaggctacaaaaggagagctaaagaactaggctacaaaaagagagctaaagaactaactatctagcaagactacagagctatagtgtagagatttcataaccggtgagcgttcaaggatactttgaagagaagaggtaatatctcaactagcaagactacaaaaaaatggagatataaaactaactgtctaacaagactacagagctatagtagagatagatacgttcgacacttaagcatgagaattcgagctcggtaccctggttcacaaactcaatacaacacacagtggagtagggtattacgctccggcggcccgaaccactctaaatccttgtgtcctcgtgtgctcttccaccattaatgactgtaattgcagggacacgaagagttgtagcgcttttgccaacaagatccgctatatgctagtagagtggaacctgcacagcaacaagcatccaataatctgagaataagaattatgtgtggtgatggttctcatctctgcaactcgccattttcgcgagagaaccaaatccaagttggtgaagatcatgatttgggctcatgggctggcatagtagctattacctttgcaattgtggttcgaatctatccgatattctccttttcagggagagctaatgcttatgcttattgggtattttggtttgacactgcttcacgcccaaaaaaaggcaactatgtctgagttggatatggcccaaaaaaaggcagctatgtctgagttggatatggaagtcttctttcgtttagggtgaagtaagaccaagctcatgagcttattatcttaggtcggaacaaattagttgataggcatggcacatttatcaaattataatgattttaacagaaaagcaacacctctttttcagcagcaccagctttgcaagctgcaattgacactccaagcatagtatttgctccaaactcagcctgcatttcgcacaatatcatatctatttccatttggataaaatatattttccagaaatatgggaacagaatcaagatacagaaaaaagttgtggtagtagtggtaagtggaaacacaagtacagtgaaaagatagcattatttctgaacagtcaaattaaccgaaataagtagtatcacatactgcccctaaattgactacacccaatgtaaagaattgcttgagcatattgagccatcagttgtttgtttgtgtaacggatttgacaatgcagagttcaggagcaaaaaaccgcaaaggagagaaagagggaaaggatctcctagtatcccaccttgtggcgcgccctgtcaagtgcatgatggcctggtcgatctgcgtctgctgctgcggttccatcccaacgagtgcctccgacaccttgtcgttgatcacccgcaccgcgtaggcgacccccctggcgaggaacttccgcctctcggaggccccggccgcgtcggcggcggcgccctcgagcgcgcccacgctagccgtagatgctcggtgcacggccttgttggtgtgcaactcgacctcaacggccggtgcgctacgcccgtcaaggatctggcgcgcccgcaccctcgtgatcacggtgggcgcctcccgcctcatgtggccgacgatgaaaagcgccgggttaggggccttggcgcgcaccgccgtattcagggcctcctcgctcttgcgcgagagcaggtgcttccccaggtactcctgcactgacaaggctgccacagcggtggaatttgtcctcacgacttcgccacgtcgtcctcacctccctggcttcccacgactccgccgtatcgaggtgctcggtgggtcgtcttaatccgaagtccgaactaggaagacgagacagagaggtctgaggaatgggcctcgtttgatgttgagctgaattatttttccagcataagcccaggtcttggtccatgaacaaaattactagaaacccagcccagtactacgatctaaaagagggactgccactggatagctctctctagcattctccacgctccaatacagcggcgtcgtgtctatccgggtctatccgcgaacacgtgagaactctccagaaactgctttctcctccacttcatctctctcgctttccctctataaaaagaccccttctaggaattgagggagacagcaagcaccaagcagcgatccgaagctcaatcaattcactcaaacctcttccccaaatcttcgattagatcttcgttgacaagaagactagaaccgaacctgacatgtccaacctgctcacggttcaccagaaccttccggctcttccagtggacgcgacgtccgatgaagtcaggaagaacctcatggacatgttccgcgacaggcaagcgttcagcgagcacacctggaagatgctgctctccgtctgccgctcctgggctgcatggtgcaagctgaacaacaggaagtggttccccgctgagcccgaggacgtgagggattaccttctgtacctgcaagcgcgaggtttgtttctgcttctacctttgatatatatataataattatcattaattagtagtaatataatatttcaaatatttttttcaaaataaaagaatgtagtatatagcaattgcttttctgtagtttataagtgtgtatattttaatttataacttttctaatatatgaccaaaacatggtgatgcctaggtctggcagtgaagaccatccagcaacaccttggacaactgaacatgcttcacaggcgctccggcctcccgcgccccagcgactcgaacgccgtgagcctcgtcatgcgccgcatcaggaaggaaaacgtcgatgccggcgaaagggcaaagcaggccctcgcgttcgagaggaccgatttcgaccaggtccgcagcctgatggagaacagcgacaggtgccaggacattaggaacctggcgttcctcggaattgcatacaacacgctcctcaggatcgcggaaattgcccgcattcgcgtgaaggacattagccgcaccgacggcggcaggatgcttatccacattggcaggaccaagacgctcgtttccaccgcaggcgtcgaaaaggccctcagcctcggagtgaccaagctcgtcgaacgctggatctccgtgtccggcgtcgcggacgacccaaacaactacctcttctgccgcgtccgcaagaacggggtggctgcccctagcgccaccagccaactcagcacgagggccttggaaggtattttcgaggccacccaccgcctgatctacggcgcgaaggatgacagcggtcaacgctacctcgcatggtccgggcactccgcccgcgttggagctgctagggacatggcccgcgccggtgtttccatccccgaaatcatgcaggcgggtggatggacgaacgtgaacattgtcatgaactacattcgcaaccttgacagcgagacgggcgcaatggttcgcctcctggaagatggtgactgaggtacccaacctagacttgtccatcttctggattggccaacttaattaatgtatgaaataaaaggatgcacacatagtgacatgctaatcactataatgtgggcatcaaagttgtgtgttatgtgtaattactagttatctgaataaaagagaaagagatcatccatatttcttatcctaaatgaatgtcacgtgtctttataattctttgatgaaccagatgcatttcattaaccaaatccatatacatataaatattaatcatatataattaatatcaattgggttagcaaaacaaatctagtctaggtgtgttttgcgatccgatatcgaattggccacggtaccagctgctgctgttctagggttcacaagtctgcctatttgtcttccccaatggagctatggttgtctggtctggtccttggtcgtgtcccgtttcattgtgtactatttacctgtaatgtgtatccttaagtctggtttgatggtgtctgaaacgttttgctgtggtagagcagcatggaagaactataatgaataagtgatccctaatcattgtgtccaaattttgcttctgctatacccttttgtgctgtttcttatgttttgcttaaaaatttgatctgacaaacaaatttgtctaaattatgctcttgttctgactgtgtactgtacacatttgtattgctaccggtttggcacatagttttctctttgattgcagatcaaacccttctgattgcagattgcttggctatggctgatgtgctcactgttcttctttagcttgtatattgctgatggtggcttggctacggctgaaaaagttgctgctgcgccgacttggcaactgttgctccagtaatgctttgtcctctcttcctagccgccgacttggcacttggcagctgttgctcctgtaatgcgttgttatctcttatctcttgagatgtactatgattttgaggctgtttgacttgtgccagattgccagtgctgatgctatattatctcaggtttttatgctagtatatgttttactgtgtgctgcctgtgtcgagttacgtaatctattgaaccgctatgcgtgttgatgccctgttgttgcttgccagattgatgcccctgttgcttgcagcttgcaagctgtagtgaaatcctaaaattccaaaccaaatctattctgaacttttgaagatctgtgatgtccggaagaaaagattcaaacagataaacgggactctccagaatctataaaataaatgatcgacaaacgctttgctttggtaggcttcaagcttggtcacccggtccgggcctagaaggccagcttcggccgccccgggcaactttattatacaaagttgatagataaatcagatatctggttcctaaggacccggcggaccgattaaactgattcggtccgacgcgttacctaataacttcgtatagcatacattatacgaagttattagctaactaactagtaagcttaagccatgggtcgacggatccgttaactagcgtggcatttggcaccgccgcacactatgcgagctaggagtgctagtttacagatgaaactatgaaaccaagaaaacacaattgtccgtagctagcgcgtggcgtcgtgtcaagcttcacacagtatcttcgttcttcactataaatcgcgcctgttgttcgtgagacccaccaccgtggataacagtcccctaataataagcgatcaacagcactgctgatggctgaacaccgaggcgccgccgcgcgtaaccatccgccggagcagcccgtcgtgccggcgaacgacgccttccccgaccgcgcccagcagctctgcctcgacgccgggcgcgcgctcgcgatgtgcggcgtgctcgtcgccgtccctcccgcattttacgcgtcgacgtcgcggacgacaccgcacttgccttcgtcggcttcgtcctctggatcatcggtgcgtggctgtgcctcctggcgctcacgcccttggctccacgggcggtgagggcgggcggggccgccgccagcaccttgctgatcaggtgcctgtccctttcatgaactactagcgcccgcgcccgcggccgccgggcacaagagaacacatcgatgttcgctgcgtacgtcagcaataaggcactctttgtcagtagtcgagtgcatatgttgggtgtttgccctgggagatttcaagtgttgtggccattatcccgcaggataaaaaatcggcggcttttggattgatacggaaaataacgatgtttcatgctcgtgttgtgtgtgtgacatcttgtcagccaagtttttaaccgttgctactccccctctgtgggctcagtgtgtggaccggaatacgtcgtacataggccgtagcctaagcccaatatgccgtttttcaggttggcctgtgtgacgacaagcgggtctcaaaagcccatcacgcaactggcctgcaattattggaggagagcgcgtcgagttggttccagaggctgcgtggtggggccggactctgcgacgacctctcgttcgcgtccgatttggttgccgtgagccgtgacgtaacgcctccttccgttcctccctatataagttccacccccgggtccggtttccccaagccccagtgacccccgatcccgatcgcgaaatctccgcacccgccggcaagggaccgaagcaagcctctctcccgaccgtcgcatcaaggtacgcgtccgctcgatctgtcctcttccttctcgatttgacttgctgtggtgcccgatcacgggatcagaatcgcaccagtgtagatttcgcatgttctaagatgtgttagtttccaggctaatccagttctcttgacgcccgatccgatcgagctccgtgtttatttcagcctaatcgtagtattcccctaaaatttcctcattagggggttcgcaagattgttggtcgacaggttcacttatgctcgatcgcttacttttagtcgattcatgctgcgtactattgttgccccccgtggttttatcttttctcgtgtgaaatccagtagatatagtagatatcgtagcattaggttttaattcaatcgattgattattgtatcatcaaaattgagaagttcgaatcatgcctatcatgctgcctcaaccgaaatcctgtatattgaagtttcaattcaattgattgatcattcattagattcaaccaaaatctagaaggttagatgacgcatgtcatgctgcctgcgtagtttacctttgatctgtttatgattaccttatcagtaggatatttgtgattttgggaagtagcactaactgattcatgctgacatgatgttccctttcagattatactgttgagtcctatctaattgatgctttgtatgctatatgaatacgtcatggtaaattagcagttaattagcatattagcaattgggcgtacctcatcaggattgctcttgtagatgtgtgtggtgatgtttcttgttcaattcatgttctgctttaaaagtatgtgttctctgtttgttaattaagattcatggttataatgatttggacctaattaatcagggttgcccttttagatgcgtggttacttgttgagttcatttttttcctgctatagttgtatgcgtttgttcattcatggttagatttgatttgtttcttctctattccatgccttccatatacttcaattgtagcttaacatgagatttctgtatatgcaggtcgaccgccggggatccacacgacaccatggcccagtccaagcacggcctgaccaaggagatgaccatgaagtaccgcatggagggctgcgtggacggccacaagttcgtgatcaccggcgagggcatcggctaccccttcaagggcaagcaggccatcaacctgtgcgtggtggagggcggccccttgcccttcgccgaggacatcttgtccgccgccttcatgtacggcaaccgcgtgttcaccgagtacccccaggacatcgtcgactacttcaagaactcctgccccgccggctacacctgggaccgctccttcctgttcgaggacggcgccgtgtgcatctgcaacgccgacatcaccgtgagcgtggaggagaactgcatgtaccacgagtccaagttctacggcgtgaacttccccgccgacggccccgtgatgaagaagatgaccgacaactgggagccctcctgcgagaagatcatccccgtgcccaagcagggcatcttgaagggcgacgtgagcatgtacctgctgctgaaggacggtggccgcttgcgctgccagttcgacaccgtgtacaaggccaagtccgtgccccgcaagatgcccgactggcacttcatccagcacaagctgacccgcgaggaccgcagcgacgccaagaaccagaagtggcacctgaccgagcacgccatcgcctccggctccgccttgccctccggactcagatctcgatagagtcaacctagacttgtccatcttctggattggccaacttaattaatgtatgaaataaaaggatgcacacatagtgacatgctaatcactataatgtgggcatcaaagttgtgtgttatgtgtaattactagttatctgaataaaagagaaagagatcatccatatttcttatcctaaatgaatgtcacgtgtctttataattctttgatgaaccagatgcatttcattaaccaaatccatatacatataaatattaatcatatataattaatatcaattgggttagcaaaacaaatctagtctaggtgtgttttgcgaattgcggcgcccttactttaacgcctctaaccaacacccctttatctttataaggaacaataaacagaatttgccccactgttctaaatcacctaataatatccccagctaaaaacaataaaggtttcctagaattaagacaagcatgactgttcctccaggagggtttggaacattgttgcagtcttgcagatacgggcgaagggtgagaaacagagcggagggctggaggtgacctcggtagtcgacgccggagttgagcttgacaacgacggggcggcccctgatggacttgaggaagtccgatggcgtcttcaccgtcccgccggcgcccgaggcgggcctgtcgctgccgccgccgccgctgctcatcttgcgcgctgtgcccccggcggtgtccctgtgttgcggatcgcgggtgggccaggtggatgcgagggcgacccgtttggactccggccggagccgccggatccctggtcggtgtcagtgccgtttactctgggccccacgtgtcagtaccgtctgtagatgacaacaacccgtcgtccacagtcatgtccaaaatatcctttcttcttttttttcgattcggatatctatcttccttttttttttccaaaaatcttcttgacgcaccagcgcgcacgtttgtggtaaacgccgacacgtcggtcccacgtcgatagaccccacccaccagtgagtagcgtgtacgtattcgggggtgacggacgtgtcgccgtcgtcttgctagtcccattcccatctgagccacacatctctgaacaaaaaaaaggagggaggcctccacgcacatccccctccgtgccacccgccccaaaccctcgcgccgcctccgagacagccgccgcaaccatggccaccgccgccgccgcgtctaccgcgctcactggcgccactaccgctgcgcccaaggcgaggcgccgggcgcacctcctggccacccgccgcgccctcgccgcgcccatcaggtgctcagcggcgtcacccgccatgccgatggctcccccggccaccccgctccggccgtggggccccaccgagccccgcaagggtgctgacatcctcgtcgagtccctcgagcgctgcggcgtccgcgacgtcttcgcctaccccggcggcgcgtccatggagatccaccaggcactcacccgctcccccgtcatcgccaaccacctcttccgccacgagcaaggggaggcctttgccgcctccggctacgcgcgctcctcgggccgcgtcggcgtctgcatcgccacctccggccccggcgccaccaacctagtctccgcgctcgccgacgcgctgctcgattccgtccccatggtcgccatcacgggacaggtggcgcgacgcatgattggcaccgacgccttccaggagacgcccatcgtcgaggtcacccgctccatcaccaagcacaactacctggtcctcgacgtcgacgacatcccccgcgtcgtgcaggaggctttcttcctcgcctcctctggtcgaccagggccggtgcttgtcgacatccccaaggacatccagcagcagatggcggtgcctgtctgggacaagcccatgagtctgcctgggtacattgcgcgccttcccaagccccctgcgactgagttgcttgagcaggtgctgcgtcttgttggtgaatcgcggcgccctgttctttatgtgggcggtggctgcgcagcatctggtgaggagttgcgacgctttgtggagctgactggaatcccggtcacaactactcttatgggcctcggcaacttccccagcgacgacccactgtctctgcgcatgctaggtatgcatgggacggtgtatgcaaattatgcagtggataaggccgatctgttgcttgcacttggtgtgcggtttgatgatcgcgtgacagggaagattgaggcttttgcaagcagggctaagattgtgcacgttgatattgatccggctgagattggcaagaacaagcagccacatgtgtccatctgtgcagatgttaagcttgctttgcagggcatgaatgctcttcttgaaggaagcacatcaaagaagagctttgactttggctcatggaacgatgagttggatcagcagaagagggaattcccccttgggtataaaacatctaatgaggagatccagccacaatatgctattcaggttcttgatgagctgacgaaaggcgaggccatcatcggcacaggtgttgggcagcaccagatgtgggcggcacagtactacacttacaagcggccaaggcagtggttgtcttcagctggtcttggggctatgggatttggtttgccggctgctgctggtgcttctgtggcaaacccaggtgtcactgttgttgacatcgatggagatggtagctttctcatgaacgttcaggagctagctatgatccgaattgagaacctcccagtgaaggtctttgtgctaaacaaccagcacctggggatggtggtgcagttggaggacaggttctataaggccaacagagcgcacacatacttgggaaacccagagaatgaaagtgagatatatccagatttcgtgacgatcgccaaagggttcaacattccagcggtccgtgtgacaaagaagaacgaagtccgcgcagcgataaagaagatgctcgagactccagggccgtacctcttggatataatcgtcccacaccaggagcatgtgttgcctatgatccctagtggtggggctttcaaggatatgatcctggatggtgatggcaggactgtgtactgactagctagtcagttaacagatctgccagatcctcggtgtacaaataacccgtcttatcctatgagacgggccggcgtcagtgtgttctggaggaatttttatgtcagagcctttttctttgtgtgcttgatgtagatgccaagggaagcttattggctgttgaagcttgatgcaaaataaattatggaactctgttttttgtttatctaataataactagcaaatatgcttccattgcattgaaactaacagccttttgtgtttccaagttttattttgtgacaatgtcatctatttcaattagttgtggaatcggaaacttgcaggactaacttggaaactccaatccctcagcatcctggactttttcctggtgtaatccatgtagatattattttaatcatcattttagttctggaggtttttccatctccggttttgctcccctttcttcaaaaaaaaaaaaaaaatgccgtaggcgccgcaacgcccacctgttgttcaaactcatgggcacgagtggctcgaagattttatacaacaattgctgtagtttcaccgttgctggtgaagaagcatttttttaaaaaaatatagtggtattcattttaattagtttagttgtgcagcgagcaaaatttggacatgctctgctcggaatctgatcgacctagacacagattagcagcagtagctttgtcatctgttccaagagttgcgatctgatagaagaaaaaaaaaccttcccttcaatgtaaaaccgaaactaacaagaaagaagcacagtgccgtttaggcaagtatggagtacgtattaagcatgtagaaggccatgcatgaaccactaacaagaaagaagcgcagtgccattcaggcaagcataagcatgtagattggcatgcatgaacaactaacagtagatcgtctctggtctgattagaagttttttgggaagccaagaaatcatgtacaactggttccatctcaaattccgtggcaaaaagaggcctaagcaacatacctcgagtagatcacattcaagcttggtcacccggtccgtcaatattctgattccgatgacttcgtaggttcctagctcaagccgctcgtgtccaagcgtcacttacgattagctaatgattacggcatctaggaccgactagtggcgcgccgactagctagctaaggtaccgagctcgaattcattccgattaatcgtggcctcttgctcttcaggatgaagagctatgtttaaacgtgcaagcgctactagacaattcagtacattaaaaacgtccgcaatgtgttattaagttgtctaagcgtcaatttgtttacaccacaatatatcctgcca

SEQ ID NO: 283 - DNA, 35927 bp, Artificial Sequence
  PHP99721
gtttacccgccaatatatcctgtcaaacactgcggccgcacttgaccgcggatggagccggagctgtggtgaggccatcgacgggaggtgggggagaacacagtctcagtgttctttgtgagtccgcaaggtttttagcttttctgtattaattaaggttgctgttggctgtagaatacggtcgtggaagagctgtatcggtagctactacgtaagctattatatactggaagtctggagctcgtcgatctccggtcgtcttcctccatttctcctcgtcttgctttgactgctgctaccatttgcttctgttttctgatgaagcatgccatgtcggccaccagtgtttgtgtggtttttgcagggaatggctttcaagtgctgtgattgaatggccctcgtcgtcctcggctgagctcacatggacgcgtcatgtgagtgagatatatgatcatatgatgagtggggttcgggtgagtgcgtacttgaagtaggatcccgctttcactcattcattcattggcctttaaaccgggaaattttcgcgaggagatggagggaagcaagcagggtgacgagtgcagagtgccgcgagcgctttgtcaaaaggcaccgccgtaggcaaaaaaatcaatggccctgactgactcgatggtagtactactgtagagactagagagggttgctccccatatcttcgtgtgacttttactccagcattgcatttccgtcattgagacgttaattaatagcagctttcgggacagatgactgtggccatgtttcgtcacggccgcttcgtgccagctgggggtactatagtactgtgattttgttagtaaaaactttcattaggccaccattgacgaccgggccttcgcttttgctgcgctaattaaccatttcccggcgaccgaagggaacatgaacatgccccgacacatgagggcatgaggactagtgttctccctgtcgttcgttgacttgactagtgatagtttaaacgctcttcaactggaagagcggttactaccggttcactagctagctgctaatcgagctagttaccctatgaggtgacatgaagcgctcacggttactatgacggttagcttcacgactgttggtggcagtagcgtacgacttagctatagttccggacttacctagctaataacttcgtatagcatacattatacgaagttatggttaccgagctgttaccaagcggccgcacactgatagtttaaactgaaggcgggaaacgacaatctgatcatgagcggagaattaagggagtcacgttatgacccccgccgatgacgcgggacaagccgttttacgtttggaactgacagaaccgcaacgattgaaggagccactcagccgcgggtttctggagtttaatgagctaagcacatacgtcagaaaccattattgcgcgttcaaaagtcgcctaaggtcactatcagctagcaaatatttcttgtcaaaaatgctccactgacgttccataaattcccctcggtatccaattagagtctcatattcactcccatggcggccaatgcgggcggcggtggagcgggaggaggcagcggcagcggcagcgtggctgcgccggcggtgtgccgccccagcggctcgcggtggacgccgacgccggagcagatcaggatgctgaaggagctctactacggctgcggcatccggtcgcccagctcggagcagatccagcgcatcaccgccatgctgcggcagcacggcaagatcgagggcaagaacgtcttctactggttccagaaccacaaggcccgcgagcgccagaagcgccgcctcaccagcctcgacgtcaacgtgcccgccgccggcgcggccgacgccaccaccagccaactcggcgtcctctcgctgtcgtcgccgccgccttcaggcgcggcgcctccctcgcccaccctcggcttctacgccgccggcaatggcggcggatcggctgtgctgctggacacgagttccgactggggcagcagcggcgctgctatggccaccgagacatgcttcctgcaggactacatgggcgtgacggacacgggcagctcgtcgcagtggccacgcttctcgtcgtcggacacgataatggcggcggccgcggcgcgggcggcgacgacgcgggcgcccgagacgctccctctcttcccgacctgcggcgacgacggcggcagcggtagcagcagctacttgccgttctggggtgccgcgtccacaactgccggcgccacttcttccgttgcgatccaacagcaacaccagctgcaggagcagtacagcttttacagcaacagcaacagcacccagctggccggcaccggcaaccaagacgtatcggcaacagcagcagcagccgccgccctggagctgagcctcagctcatggtgctccccttaccctgctgcagggagtatgtgagagcaacgcgagctgccactgctcttcactgatgtctctggaatggaaggaggaggaagtgagaacagatcattcgacaaagcagcattagtccgttgatcggtggaagaccactcgtcagtgttgagttgaatgtttgatcaataaaatacggcaatgctgtaagggttgttttttatgccattgataatacactgtactgttcagttgttgaactctatttcttagccatgccaagtgcttttcttattttgaataacattacagcaaaaagttgaaagacaaaaaaaaaaacccccgaacagagtgctttgggtcccaagcttctttagactgtgttcggcgttccccctaaatttctccccctatatctcactcacttgtcacatcagcgttctctttccccctatatctccacgctctacagcagttccacctatatcaaacctctataccccaccacaacaatattatatactttcatcttcaactaactcatgtaccttccaatttttttctactaataattatttacgtgcacagaaacttagcaaggagagagagagcgggaatttaaatgctcggcgttaggcttttagtccgctaggtggctagaccgaggttaggacgctagttcactaggggcctagtggtgttttaagacgtcacggtcactacgaatcgaccgaagcttgcatgggccgcatcgagcagctggcttgtggggaccagacaaaaaaggaatggtgcagaattgttaggcgcacctaccaaaagcatctttgcctttattgcaaagataaagcagattcctctagtacaagtggggaacaaaataacgtggaaaagagctgtcctgacagcccactcactaatgcgtatgacgaacgcagtgacgaccacaaaactcgagcaacgagatcatgagccaatcaaagaggagtgatgtagacctaaagcaataatggagccatgacgtaagggcttacgcccatacgaaataattaaaggctgatgtgacctgtcggtctctcagaacctttactttttatgtttggcgtgtatttttaaatttccacggcaatgacgatgtgaccgtcgacccactaaaacattgctttgtcaaaagctaaaaaagatgatgcccgacagccacttgtgtgaagcatgagaagccggtccctccactaagaaaattagtgaagcatcttccagtggtccctccactcacagctcaatcagtgagcaacaggacgaaggaaatgacgtaagccatgacgtctaatcccagggccagcttgcatgcctgcagtgcagcgtgacccggtcgtgcccctctctagagataatgagcattgcatgtctaagttataaaaaattaccacatattttttttgtcacacttgtttgaagtgcagtttatctatctttatacatatatttaaactttactctacgaataatataatctatagtactacaataatatcagtgttttagagaatcatataaatgaacagttagacatggtctaaaggacaattgagtattttgacaacaggactctacagttttatctttttagtgtgcatgtgttctcctttttttttgcaaatagcttcacctatataatacttcatccattttattagtacatccatttagggtttagggttaatggtttttatagactaatttttttagtacatctattttattctattttagcctctaaattaagaaaactaaaactctattttagtttttttatttaataatttagatataaaatagaataaaataaagtgactaaaaattaaacaaataccctttaagaaattaaaaaaactaaggaaacatttttcttgtttcgagtagataatgccagcctgttaaacgccgtcgacgagtctaacggacaccaaccagcgaaccagcagcgtcgcgtcgggccaagcgaagcagacggcacggcatctctgtcgctgcctctggacccctctcgagagttccgctccaccgttggacttgctccgctgtcggcatccagaaattgcgtggcggagcggcagacgtgagccggcacggcaggcggcctcctcctcctctcacggcaccggcagctacgggggattcctttcccaccgctccttcgctttcccttcctcgcccgccgtaataaatagacaccccctccacaccctctttccccaacctcgtgttgttcggagcgcacacacacacaaccagatctcccccaaatccacccgtcggcacctccgcttcaaggtacgccgctcgtcctcccccccccccctctctaccttctctagatcggcgttccggtccatgcatggttagggcccggtagttctacttctgttcatgtttgtgttagatccgtgtttgtgttagatccgtgctgctagcgttcgtacacggatgcgacctgtacgtcagacacgttctgattgctaacttgccagtgtttctctttggggaatcctgggatggctctagccgttccgcagacgggatcgatttcatgattttttttgtttcgttgcatagggtttggtttgcccttttcctttatttcaatatatgccgtgcacttgtttgtcgggtcatcttttcatgcttttttttgtcttggttgtgatgatgtggtctggttgggcggtcgttctagatcggagtagaattctgtttcaaactacctggtggatttattaattttggatctgtatgtgtgtgccatacatattcatagttacgaattgaagatgatggatggaaatatcgatctaggataggtatacatgttgatgcgggttttactgatgcatatacagagatgctttttgttcgcttggttgtgatgatgtggtgtggttgggcggtcgttcattcgttctagatcggagtagaatactgtttcaaactacctggtgtatttattaattttggaactgtatgtgtgtgtcatacatcttcatagttacgagtttaagatggatggaaatatcgatctaggataggtatacatgttgatgtgggttttactgatgcatatacatgatggcatatgcagcatctattcatatgctctaaccttgagtacctatctattataataaacaagtatgttttataattattttgatcttgatatacttggatgatggcatatgcagcagctatatgtggatttttttagccctgccttcatacgctatttatttgcttggtactgtttcttttgtcgatgctcaccctgttgtttggtgttacttctgcaggtcgactttaacttagcctaggatccatggccactgtgaacaactggctcgctttctccctctccccgcaggagctgccgccctcccagacgacggactccacactcatctcggccgccaccgccgaccatgtctccggcgatgtctgcttcaacatcccccaagattggagcatgaggggatcagagctttcggcgctcgtcgcggagccgaagctggaggacttcctcggcggcatctccttctccgagcagcatcacaaggccaactgcaacatgatacccagcactagcagcacagtttgctacgcgagctcaggtgctagcaccggctaccatcaccagctgtaccaccagcccaccagctcagcgctccacttcgcggactccgtaatggtggcttcctcggccggtgtccacgacggcggtgccatgctcagcgcggccgccgctaacggtgtcgctggcgctgccagtgccaacggcggcggcatcgggctgtccatgattaagaactggctgcggagccaaccggcgcccatgcagccgagggtggcggcggctgagggcgcgcaggggctctctttgtccatgaacatggcggggacgacccaaggcgctgctggcatgccacttctcgctggagagcgcgcacgggcgcccgagagtgtatcgacgtcagcacagggtggagccgtcgtcgtcacggcgccgaaggaggatagcggtggcagcggtgttgccggcgctctagtagccgtgagcacggacacgggtggcagcggcggcgcgtcggctgacaacacggcaaggaagacggtggacacgttcgggcagcgcacgtcgatttaccgtggcgtgacaaggcatagatggactgggagatatgaggcacatctttgggataacagttgcagaagggaagggcaaactcgtaagggtcgtcaagtctatttaggtggctatgataaagaggagaaagctgctagggcttatgatcttgctgctctgaagtactggggtgccacaacaacaacaaattttccagtgagtaactacgaaaaggagctcgaggacatgaagcacatgacaaggcaggagtttgtagcgtctctgagaaggaagagcagtggtttctccagaggtgcatccatttacaggggagtgactaggcatcaccaacatggaagatggcaagcacggattggacgagttgcagggaacaaggatctttacttgggcaccttcagcacccaggaggaggcagcggaggcgtacgacatcgcggcgatcaagttccgcggcctcaacgccgtcaccaacttcgacatgagccgctacgacgtgaagagcatcctggacagcagcgccctccccatcggcagcgccgccaagcgcctcaaggaggccgaggccgcagcgtccgcgcagcaccaccacgccggcgtggtgagctacgacgtcggccgcatcgcctcgcagctcggcgacggcggagccctggcggcggcgtacggcgcgcactaccacggcgccgcctggccgaccatcgcgttccagccgggcgccgccagcacaggcctgtaccacccgtacgcgcagcagccaatgcgcggcggcgggtggtgcaagcaggagcaggaccacgcggtgatcgcggccgcgcacagcctgcaggacctccaccacctgaacctgggcgcggccggcgcgcacgactttttctcggcagggcagcaggccgccgccgctgcgatgcacggcctgggtagcatcgacagtgcgtcgctcgagcacagcaccggctccaactccgtcgtctacaacggcggggtcggcgacagcaacggcgccagcgccgtcggcggcagtggcggtggctacatgatgccgatgagcgctgccggagcaaccactacatcggcaatggtgagccacgagcaggtgcatgcacgggcctacgacgaagccaagcaggctgctcagatggggtacgagagctacctggtgaacgcggagaacaatggtggcggaaggatgtctgcatgggggactgtcgtgtctgcagccgcggcggcagcagcaagcagcaacgacaacatggccgccgacgtcgggcatggcggcgcgcagctcttcagtgtctggaacgacacttaagcgtacctagtggtacctgacatcttatagtctgcaacctctcgtgtctgaattcctatctttatcaagtgttattgcttccacgactataggacagctttcgtcgaaagcttttgctcatgtgatctcgaaggattcatctagtctgatttttcgtgacttgtatcggttttattggattcatccaacatatatcaataaaaaatgagttgtgtttcctttcttcctagttcagttaaaattatttccctcctgcgcttgtgctgtaattgtctgtgtacctgttgtttgtgactgtgttagttcccttggatatgatttcgtatttgatatgtacatggagatagcttagcttcattattggagtatgaagttagtatgacatagtcactctcctggaaaattgacactgcaaaccatatttttattctgaaccacaaatcctagtcagtccgctggcatatgccgtccgtttgctgaatccagaacgtgggtttggagatgtacggctgagatgcctctatgcgaaggggatttcgtggtgaaacgagatgggagtagagcaacgcccgtggaagatgcttcaaacttccacacttttgagcaacgatcggcagtagtaaggtagacgatttcaagatcaaagcatatgaagataaacaacatcaacaacaaaatttgttggggttctatagagagaaacagagctacatacatacactgttttgtatctaccatctgagatgatgaaaagatgaaaaactaaagaatgccccggcgccaacgccaggacacgccgcgcgcgcgtcacccgagccatctcttgacccagccggcgctgtatatttacacacgttgcagcatcgatcaccacctgttcgatcgcgtcgccgtcaccggcgcgccgcgacttattgaactagtctagggcgcggctaacaacctagcttagattgccttgtctaaacccttaggctaacgcgccacccgcggttcaaagccaatgactgttgttaggtccagtttctaaggacgaatcatccaatcactggttctttctgaacaaaacaaagagctatagagttacgttactgtagccgagacagagcctgcaatctggttatgccacatactaggttctttcttaaagttgactcactctatcctaagttctacttacaaggagctacaacaaattggtcataaccggagagcgttcaaggaggtaatatcccatcttactctgtagcaaggctacaaaaggagagctaaagaactaggctacaaaaagagagctaaagaactaactatctagcaagactacagagctatagtgtagagatttcataaccggtgagcgttcaaggatactttgaagagaagaggtaatatctcaactagcaagactacaaaaaaatggagatataaaactaactgtctaacaagactacagagctatagtagagatagatacgttcgacacttaagcatgagaattcgagctcggtaccctggttcacaaactcaatacaacacacagtggagtagggtattacgctccggcggcccgaaccactctaaatccttgtgtcctcgtgtgctcttccaccattaatgactgtaattgcagggacacgaagagttgtagcgcttttgccaacaagatccgctatatgctagtagagtggaacctgcacagcaacaagcatccaataatctgagaataagaattatgtgtggtgatggttctcatctctgcaactcgccattttcgcgagagaaccaaatccaagttggtgaagatcatgatttgggctcatgggctggcatagtagctattacctttgcaattgtggttcgaatctatccgatattctccttttcagggagagctaatgcttatgcttattgggtattttggtttgacactgcttcacgcccaaaaaaaggcaactatgtctgagttggatatggcccaaaaaaaggcagctatgtctgagttggatatggaagtcttctttcgtttagggtgaagtaagaccaagctcatgagcttattatcttaggtcggaacaaattagttgataggcatggcacatttatcaaattataatgattttaacagaaaagcaacacctctttttcagcagcaccagctttgcaagctgcaattgacactccaagcatagtatttgctccaaactcagcctgcatttcgcacaatatcatatctatttccatttggataaaatatattttccagaaatatgggaacagaatcaagatacagaaaaaagttgtggtagtagtggtaagtggaaacacaagtacagtgaaaagatagcattatttctgaacagtcaaattaaccgaaataagtagtatcacatactgcccctaaattgactacacccaatgtaaagaattgcttgagcatattgagccatcagttgtttgtttgtgtaacggatttgacaatgcagagttcaggagcaaaaaaccgcaaaggagagaaagagggaaaggatctcctagtatcccaccttgtggcgcgccctgtcaagtgcatgatggcctggtcgatctgcgtctgctgctgcggttccatcccaacgagtgcctccgacaccttgtcgttgatcacccgcaccgcgtaggcgacccccctggcgaggaacttccgcctctcggaggccccggccgcgtcggcggcggcgccctcgagcgcgcccacgctagccgtagatgctcggtgcacggccttgttggtgtgcaactcgacctcaacggccggtgcgctacgcccgtcaaggatctggcgcgcccgcaccctcgtgatcacggtgggcgcctcccgcctcatgtggccgacgatgaaaagcgccgggttaggggccttggcgcgcaccgccgtattcagggcctcctcgctcttgcgcgagagcaggtgcttccccaggtactcctgcactgacaaggctgccacagcggtggaatttgtcctcacgacttcgccacgtcgtcctcacctccctggcttcccacgactccgccgtatcgaggtgctcggtgggtcgtcttaatccgaagtccgaactaggaagacgagacagagaggtctgaggaatgggcctcgtttgatgttgagctgaattatttttccagcataagcccaggtcttggtccatgaacaaaattactagaaacccagcccagtactacgatctaaaagagggactgccactggatagctctctctagcattctccacgctccaatacagcggcgtcgtgtctatccgggtctatccgcgaacacgtgagaactctccagaaactgctttctcctccacttcatctctctcgctttccctctataaaaagaccccttctaggaattgagggagacagcaagcaccaagcagcgatccgaagctcaatcaattcactcaaacctcttccccaaatcttcgattagatcttcgttgacaagaagactagaaccgaacctgacatgtccaacctgctcacggttcaccagaaccttccggctcttccagtggacgcgacgtccgatgaagtcaggaagaacctcatggacatgttccgcgacaggcaagcgttcagcgagcacacctggaagatgctgctctccgtctgccgctcctgggctgcatggtgcaagctgaacaacaggaagtggttccccgctgagcccgaggacgtgagggattaccttctgtacctgcaagcgcgaggtttgtttctgcttctacctttgatatatatataataattatcattaattagtagtaatataatatttcaaatatttttttcaaaataaaagaatgtagtatatagcaattgcttttctgtagtttataagtgtgtatattttaatttataacttttctaatatatgaccaaaacatggtgatgcctaggtctggcagtgaagaccatccagcaacaccttggacaactgaacatgcttcacaggcgctccggcctcccgcgccccagcgactcgaacgccgtgagcctcgtcatgcgccgcatcaggaaggaaaacgtcgatgccggcgaaagggcaaagcaggccctcgcgttcgagaggaccgatttcgaccaggtccgcagcctgatggagaacagcgacaggtgccaggacattaggaacctggcgttcctcggaattgcatacaacacgctcctcaggatcgcggaaattgcccgcattcgcgtgaaggacattagccgcaccgacggcggcaggatgcttatccacattggcaggaccaagacgctcgtttccaccgcaggcgtcgaaaaggccctcagcctcggagtgaccaagctcgtcgaacgctggatctccgtgtccggcgtcgcggacgacccaaacaactacctcttctgccgcgtccgcaagaacggggtggctgcccctagcgccaccagccaactcagcacgagggccttggaaggtattttcgaggccacccaccgcctgatctacggcgcgaaggatgacagcggtcaacgctacctcgcatggtccgggcactccgcccgcgttggagctgctagggacatggcccgcgccggtgtttccatccccgaaatcatgcaggcgggtggatggacgaacgtgaacattgtcatgaactacattcgcaaccttgacagcgagacgggcgcaatggttcgcctcctggaagatggtgactgaggtacccaacctagacttgtccatcttctggattggccaacttaattaatgtatgaaataaaaggatgcacacatagtgacatgctaatcactataatgtgggcatcaaagttgtgtgttatgtgtaattactagttatctgaataaaagagaaagagatcatccatatttcttatcctaaatgaatgtcacgtgtctttataattctttgatgaaccagatgcatttcattaaccaaatccatatacatataaatattaatcatatataattaatatcaattgggttagcaaaacaaatctagtctaggtgtgttttgcgatccgatatcgaattggccacggtaccagctgctgctgttctagggttcacaagtctgcctatttgtcttccccaatggagctatggttgtctggtctggtccttggtcgtgtcccgtttcattgtgtactatttacctgtaatgtgtatccttaagtctggtttgatggtgtctgaaacgttttgctgtggtagagcagcatggaagaactataatgaataagtgatccctaatcattgtgtccaaattttgcttctgctatacccttttgtgctgtttcttatgttttgcttaaaaatttgatctgacaaacaaatttgtctaaattatgctcttgttctgactgtgtactgtacacatttgtattgctaccggtttggcacatagttttctctttgattgcagatcaaacccttctgattgcagattgcttggctatggctgatgtgctcactgttcttctttagcttgtatattgctgatggtggcttggctacggctgaaaaagttgctgctgcgccgacttggcaactgttgctccagtaatgctttgtcctctcttcctagccgccgacttggcacttggcagctgttgctcctgtaatgcgttgttatctcttatctcttgagatgtactatgattttgaggctgtttgacttgtgccagattgccagtgctgatgctatattatctcaggtttttatgctagtatatgttttactgtgtgctgcctgtgtcgagttacgtaatctattgaaccgctatgcgtgttgatgccctgttgttgcttgccagattgatgcccctgttgcttgcagcttgcaagctgtagtgaaatcctaaaattccaaaccaaatctattctgaacttttgaagatctgtgatgtccggaagaaaagattcaaacagataaacgggactctccagaatctataaaataaatgatcgacaaacgctttgctttggtaggcttcaagcttataacttcgtatagcatacattatacgaagttatgggcccacgcgtgaagagcggttaccagagctggtcacctttgtccaccaagatggaactgtcttcggccagaatggccatctggattcagcaggcctagaaggccatttatcgctatcaactttgtatagaaaagttgggccgaattcgagctcggtacggccagaatggcccggaccgacctgcagtgcagcgtgacccggtcgtgcccctctctagagataatgagcattgcatgtctaagttataaaaaattaccacatattttttttgtcacacttgtttgaagtgcagtttatctatctttatacatatatttaaactttactctacgaataatataatctatagtactacaataatatcagtgttttagagaatcatataaatgaacagttagacatggtctaaaggacaattgagtattttgacaacaggactctacagttttatctttttagtgtgcatgtgttctcctttttttttgcaaatagcttcacctatataatacttcatccattttattagtacatccatttagggtttagggttaatggtttttatagactaatttttttagtacatctattttattctattttagcctctaaattaagaaaactaaaactctattttagtttttttatttaataatttagatataaaatagaataaaataaagtgactaaaaattaaacaaataccctttaagaaattaaaaaaactaaggaaacatttttcttgtttcgagtagataatgccagcctgttaaacgccgtcgacgagtctaacggacaccaaccagcgaaccagcagcgtcgcgtcgggccaagcgaagcagacggcacggcatctctgtcgctgcctctggacccctctcgagagttccgctccaccgttggacttgctccgctgtcggcatccagaaattgcgtggcggagcggcagacgtgagccggcacggcaggcggcctcctcctcctctcacggcaccggcagctacgggggattcctttcccaccgctccttcgctttcccttcctcgcccgccgtaataaatagacaccccctccacaccctctttccccaacctcgtgttgttcggagcgcacacacacacaaccagatctcccccaaatccacccgtcggcacctccgcttcaaggtacgccgctcgtcctcccccccccccctctctaccttctctagatcggcgttccggtccatgcatggttagggcccggtagttctacttctgttcatgtttgtgttagatccgtgtttgtgttagatccgtgctgctagcgttcgtacacggatgcgacctgtacgtcagacacgttctgattgctaacttgccagtgtttctctttggggaatcctgggatggctctagccgttccgcagacgggatcgatttcatgattttttttgtttcgttgcatagggtttggtttgcccttttcctttatttcaatatatgccgtgcacttgtttgtcgggtcatcttttcatgcttttttttgtcttggttgtgatgatgtggtctggttgggcggtcgttctagatcggagtagaattctgtttcaaactacctggtggatttattaattttggatctgtatgtgtgtgccatacatattcatagttacgaattgaagatgatggatggaaatatcgatctaggataggtatacatgttgatgcgggttttactgatgcatatacagagatgctttttgttcgcttggttgtgatgatgtggtgtggttgggcggtcgttcattcgttctagatcggagtagaatactgtttcaaactacctggtgtatttattaattttggaactgtatgtgtgtgtcatacatcttcatagttacgagtttaagatggatggaaatatcgatctaggataggtatacatgttgatgtgggttttactgatgcatatacatgatggcatatgcagcatctattcatatgctctaaccttgagtacctatctattataataaacaagtatgttttataattattttgatcttgatatacttggatgatggcatatgcagcagctatatgtggatttttttagccctgccttcatacgctatttatttgcttggtactgtttcttttgtcgatgctcaccctgttgtttggtgttacttctgcaggtcgactctagaggatccaccggtcgccaccatggcaccgaagaagaagcgcaaggtgatggacaagaagtacagcatcggcctcgacatcggcaccaactcggtgggctgggccgtcatcacggacgaatataaggtcccgtcgaagaagttcaaggtcctcggcaatacagaccgccacagcatcaagaaaaacttgatcggcgccctcctgttcgatagcggcgagaccgcggaggcgaccaggctcaagaggaccgccaggagacggtacactaggcgcaagaacaggatctgctacctgcaggagatcttcagcaacgagatggcgaaggtggacgactccttcttccaccgcctggaggaatcattcctggtggaggaggacaagaagcatgagcggcacccaatcttcggcaacatcgtcgacgaggtaagtttctgcttctacctttgatatatatataataattatcattaattagtagtaatataatatttcaaatatttttttcaaaataaaagaatgtagtatatagcaattgcttttctgtagtttataagtgtgtatattttaatttataacttttctaatatatgaccaaaacatggtgatgtgcaggtggcctaccacgagaagtacccgacaatctaccacctccggaagaaactggtggacagcacagacaaggcggacctccggctcatctaccttgccctcgcgcatatgatcaagttccgcggccacttcctcatcgagggcgacctgaacccggacaactccgacgtggacaagctgttcatccagctcgtgcagacgtacaatcaactgttcgaggagaaccccataaacgctagcggcgtggacgccaaggccatcctctcggccaggctctcgaaatcaagaaggctggagaaccttatcgcgcagttgccaggcgaaaagaagaacggcctcttcggcaaccttattgcgctcagcctcggcctgacgccgaacttcaaatcaaacttcgacctcgcggaggacgccaagctccagctctcaaaggacacctacgacgacgacctcgacaacctcctggcccagataggagaccagtacgcggacctcttcctcgccgccaagaacctctccgacgctatcctgctcagcgacatccttcgggtcaacaccgaaattaccaaggcaccgctgtccgccagcatgattaaacgctacgacgagcaccatcaggacctcacgctgctcaaggcactcgtccgccagcagctccccgagaagtacaaggagatcttcttcgaccaatcaaaaaacggctacgcgggatatatcgacggcggtgccagccaggaagagttctacaagttcatcaaaccaatcctggagaagatggacggcaccgaggagttgctggtcaagctcaacagggaggacctcctcaggaagcagaggaccttcgacaacggctccatcccgcatcagatccacctgggcgaactgcatgccatcctgcggcgccaggaggacttctacccgttcctgaaggataaccgggagaagatcgagaagatcttgacgttccgcatcccatactacgtgggcccgctggctcgcggcaactcccggttcgcctggatgacccggaagtcggaggagaccatcacaccctggaactttgaggaggtggtcgataagggcgctagcgctcagagcttcatcgagcgcatgaccaacttcgataaaaacctgcccaatgaaaaagtcctccccaagcactcgctgctctacgagtacttcaccgtgtacaacgagctcaccaaggtcaaatacgtcaccgagggcatgcggaagccggcgttcctgagcggcgagcagaagaaggcgatagtggacctcctcttcaagaccaacaggaaggtgaccgtgaagcaattaaaagaggactacttcaagaaaatagagtgcttcgactccgtggagatctcgggcgtggaggatcggttcaacgcctcactcggcacgtatcacgacctcctcaagatcattaaagacaaggacttcctcgacaacgaggagaacgaggacatcctcgaggacatcgtcctcaccctgaccctgttcgaggaccgcgaaatgatcgaggagaggctgaagacctacgcgcacctgttcgacgacaaggtcatgaaacagctcaagaggcgccgctacactggttggggaaggctgtcccgcaagctcattaatggcatcagggacaagcagagcggcaagaccatcctggacttcctcaagtccgacgggttcgccaaccgcaacttcatgcagctcattcacgacgactcgctcacgttcaaggaagacatccagaaggcacaggtgagcgggcagggtgactccctccacgaacacatcgccaacctggccggctcgccggccattaaaaagggcatcctgcagacggtcaaggtcgtcgacgagctcgtgaaggtgatgggccggcacaagcccgaaaatatcgtcatagagatggccagggagaaccagaccacccaaaaagggcagaagaactcgcgcgagcggatgaaacggatcgaggagggcattaaagagctcgggtcccagatcctgaaggagcaccccgtggaaaatacccagctccagaatgaaaagctctacctctactacctgcagaacggccgcgacatgtacgtggaccaggagctggacattaatcggctatcggactacgacgtcgaccacatcgtgccgcagtcgttcctcaaggacgatagcatcgacaacaaggtgctcacccggtcggataaaaatcggggcaagagcgacaacgtgcccagcgaggaggtcgtgaagaagatgaaaaactactggcgccagctcctcaacgcgaaactgatcacccagcgcaagttcgacaacctgacgaaggcggaacgcggtggcttgagcgaactcgataaggcgggcttcataaaaaggcagctggtcgagacgcgccagatcacgaagcatgtcgcccagatcctggacagccgcatgaatactaagtacgatgaaaacgacaagctgatccgggaggtgaaggtgatcacgctgaagtccaagctcgtgtcggacttccgcaaggacttccagttctacaaggtccgcgagatcaacaactaccaccacgcccacgacgcctacctgaatgcggtggtcgggaccgccctgatcaagaagtacccgaagctggagtcggagttcgtgtacggcgactacaaggtctacgacgtgcgcaaaatgatcgccaagtccgagcaggagatcggcaaggccacggcaaaatacttcttctactcgaacatcatgaacttcttcaagaccgagatcaccctcgcgaacggcgagatccgcaagcgcccgctcatcgaaaccaacggcgagacgggcgagatcgtctgggataagggccgggatttcgcgacggtccgcaaggtgctctccatgccgcaagtcaatatcgtgaaaaagacggaggtccagacgggcgggttcagcaaggagtccatcctcccgaagcgcaactccgacaagctcatcgcgaggaagaaggattgggacccgaaaaaatatggcggcttcgacagcccgaccgtcgcatacagcgtcctcgtcgtggcgaaggtggagaagggcaagtcaaagaagctcaagtccgtgaaggagctgctcgggatcacgattatggagcggtcctccttcgagaagaacccgatcgacttcctagaggccaagggatataaggaggtcaagaaggacctgattattaaactgccgaagtactcgctcttcgagctggaaaacggccgcaagaggatgctcgcctccgcaggcgagttgcagaagggcaacgagctcgccctcccgagcaaatacgtcaatttcctgtacctcgctagccactatgaaaagctcaagggcagcccggaggacaacgagcagaagcagctcttcgtggagcagcacaagcattacctggacgagatcatcgagcagatcagcgagttctcgaagcgggtgatcctcgccgacgcgaacctggacaaggtgctgtcggcatataacaagcaccgcgacaaaccaatacgcgagcaggccgaaaatatcatccacctcttcaccctcaccaacctcggcgctccggcagccttcaagtacttcgacaccacgattgaccggaagcggtacacgagcacgaaggaggtgctcgatgcgacgctgatccaccagagcatcacagggctctatgaaacacgcatcgacctgagccagctgggcggagacaagagaccacgggaccgccacgatggcgagctgggaggccgcaagcgggcaaggtaggtaccgtcatgggtcgtttaagctgccgatgtgcctgcgtcgtctggtgccctctctccatatggaggttgtcaaagtatctgctgttcgtgtcatgagtcgtgtcagtgttggtttaataatggaccggttgtgttgtgtgtgcgtactacccagaactatgacaaatcatgaataagtttgatgtttgaaattaaagcctgtgctcattatgttctgtctttcagttgtctcctaatatttgcctgcaggtactggctatctaccgtttcttacttaggaggtgtttgaatgcactaaaactaatagttagtggctaaaattagttaaaacatccaaacaccatagctaatagttgaactattagctatttttggaaaattagttaatagtgaggtagttatttgttagctagctaattcaactaacaatttttagccaactaacaattagtttcagtgcattcaaacacccccttaatgttaacgtggttctatctaccgtctcctaatatatggttgattgttcggtttgttgctatgctattgggttctgattgctgctagttcttgctgaatccagaagttctcgtagtatagctcagattcatattatttatttgagtgataagtgatccaggttattactatgttagctaggttttttttacaaggataaattatctgtgatcataattcttatgaaagctttatgtttcctggaggcagtggcatgcaatgcatgacagcaacttgatcacaccagctgaggtagatacggtaacaaggttcttaaatctgttcaccaaatcattggagaacacacatacacattcttgccagtcttggttagagaaatttcatgacaaaatgccaaagctgtcttgactcttcacttttggccatgagtcgtgacttaacggcaaacgctaattagtcactaggcccaggaaacactaactaagccctagcttatcctagcgcaacctagttaggtcttccccaagtttgtacaaaaaagcaggctggatcggccagaatggccccggaccggagctttgagagtacaatgatgaacctagattaatcaatgccaaagtctgaaaaatgcaccctcagtctatgatccagaaaatcaagattgcttgaggccctgttcggttgttccggattagagccccggattaattcctagccggattacttctctaatttatatagattttgatgagctggaatgaatcctggcttattccggtacaaccgaacaggccctgaaggataccagtaatcgctgagctaaattggcatgctgtcagagtgtcagtattgcagcaaggtagtgagataaccggcatcatggtgccagtttgatggcaccattagggttagagatggtggccatgggcgcatgtcctggccaactttgtatgatatatggcagggtgaataggaaagtaaaattgtattgtaaaaagggatttcttctgtttgttagcgcatgtacaaggaatgcaagttttgagcgagggggcatcaaagatctggctgtgtttccagctgtttttgttagccccatcgaatccttgacataatgatcccgcttaaataagcaacctcgcttgtatagttccttgtgctctaacacacgatgatgataagtcgtaaaatagtggtgtccaaagaatttccaggcccagttgtaaaagctaaaatgctattcgaatttctactagcagtaagtcgtgtttagaaattatttttttatataccttttttccttctatgtacagtaggacacagtgtcagcgccgcgttgacggagaatatttgcaaaaaagtaaaagagaaagtcatagcggcgtatgtgccaaaaacttcgtcacagagagggccataagaaacatggcccacggcccaatacgaagcaccgcgacgaagcccaaacagcagtccgtaggtggagcaaagcgctgggtaatacgcaaacgttttgtcccaccttgactaatcacaagagtggagcgtaccttataaaccgagccgcaagcaccgaattgcataatgaggatcgaggatggttttagagctagaaatagcaagttaaaataaggctagtccgttatcaacttgaaaaagtggcaccgagtcggtgctttttttttgcggccgcgtctaaaaacggcccctaactaacgcttagttgcccgctagattagtcccccgttagtgcctagttagacacacgacgaactaggggctagaattcctgcaaattgggttagcaaaacaaatctagtctaggtgtgttttgcgatccgatcgatggggatttatccccgtggggaacggggatggggaagaaatgtctctcgcaagagttcgtgggaatccccgcgggaaatttttttgtcgcggggacggatacggggagccaaagggtgccatccctaacaccgacaccgggcctgacgctgtcgccgcagctgctcatcttgtggttgtgggctgtgcccggtttccctgttgcggattgcgggtggcagcctggcaggtgggtgcgacccgtttggattcccttgtctgggccccttgtgtcagtaccgtctgtactccgatgacatgcaccgtcgtccacagtcaagtccaaaatctcccctctttttttaacggaacagttcaaaacctccttgacgcacgctgtcgtgtaccagcactcggtggacaccacgtttgtaatccaggccgacacgtcggtcccacgtcgacaggccccaccgtccggtctgtagcgtgtacgtattcgggcgacggacgtgtcgtcgtcgtcttgcgagtcccattcccatcaccatctgagccacacatcctctgaacaaaagcagggaggcctccacgcacatccccctttctcccactccgtgtccgtggcacccaccccaaaccctcgcgccgcctccgagacagccgccgcaaccatggccaccgccgccgccgcgtctaccgcgctcactggcgccactaccgctgcgcccaaggcgaggcgccgggcgcacctcctggccacccgccgcgccctcgccgcgcccatcaggtgctcagcggcgtcacccgccatgccgatggctcccccggccaccccgctccggccgtggggccccaccgagccccgcaagggtgctgacatcctcgtcgagtccctcgagcgctgcggcgtccgcgacgtcttcgcctaccccggcggcgcgtcgatggagatccaccaggcactcacccgctcccccgtcatcgccaaccacctcttccgccacgagcaaggggaggcctttgccgcctccggctacgcgcgctcctcgggccgcgtcggcgtctgcatcgccacctccggccccggcgccaccaacctagtctccgcgctcgccgacgcgctgctcgattccgtcccgatggtcgccatcacgggacaggtggcgcgacgcatgattggcaccgacgccttccaggagacgcccatcgtcgaggtcacgcgctccatcaccaagcacaactacctggtcctcgacgtcgacgacatcccccgcgtcgtgcaggaggctttcttcctcgcctcctctggtcgaccagggccggtgcttgtcgacatccccaaggacatccagcagcagatggcggtgcctgtctgggacaagcccatgagtctgcctgggtacattgcgcgccttcccaagccccctgcgactgagttgcttgagcaggtgctgcgtcttgttggtgaatcgcggcgccctgttctttatgtgggcggtggctgcgcagcatctggtgaggagttgcgacgctttgtggagctgactggaatcccggtcacaactactcttatgggcctcggcaacttccccagcgacgacccactgtctctgcgcatgctaggtatgcatgggacggtgtatgcaaattatgcagtggataaggccgatctgttgcttgcacttggtgtgcggtttgatgatcgcgtgacagggaagattgaggcttttgcaagcagggctaagattgtgcacgttgatattgatccggctgagattggcaagaacaagcagccacatgtgtccatctgtgcagatgttaagcttgctttgcagggcatgaatgctcttcttgaaggaagcacatcaaagaagagctttgactttggctcatggaacgatgagttggatcagcagaagagggaattcccccttgggtataaaacatctaatgaggagatccagccacaatatgctattcaggttcttgatgagctgacgaaaggcgaggccatcatcggcacaggtgttgggcagcaccagatgtgggcggcacagtactacacttacaagcggccaaggcagtggttgtcttcagctggtcttggggctatgggatttggtttgccggctgctgctggtgcttctgtggcaaacccaggtgtcactgttgttgacatcgatggagatggtagctttctcatgaacgttcaggagctagctatgatccgaattgagaacctcccagtgaaggtctttgtgctaaacaaccagcacctggggatggtggtgcagttggaggacaggttctataaggccaacagagcgcacacatacttgggaaacccagagaatgaaagtgagatatatccagatttcgtgacgatcgccaaagggttcaacattccagccgtccgtgtgacaaagaagaacgaagtccgcgcagcgataaagaagatgctcgagactccagggccgtacctcttggatataatcgtcccacaccaggagcatgtgttgcctatgatccctagtggtggggctttcaaggatatgatcctggatggtgatggcaggactgtgtactgacttcgaataggtacccggggatcctctagtgccgtgggtcgtttaagctgccgctgtacctgtgtcgtctggtgccttctggtgtacctgggaggttgtcgtctatcaagtatctgtggttggtgtcatgagtcagtgagtcccaatactgttcgtgtcctgtgtgcattatacccaaaactgttatgggcaaatcatgaataagcttgatgttcgaacttaaaagtctctgctcaatatggtattatggttgtttttgttcgtctcctaatatttgcctgggatcaaattttattggctggtgttcatttgacctccatgttcttgctaggctccattttttactctacagccataatatgtttgattgtttggtttgttctttgttgtacacctggttctgtcgagcttagttttcgacactggcttacagcttaacatgttgctattttattgggttctgattgctattttattgggttctgattgctagtttttgctgaatccaaaaaccatgttatttatttaagcgatccaggttattattatgatggtggctaagtttttttttttccaagggtaaattttctggattctccagtgtttctgtggccgaattcaatcactagagtcgacctgcagtcacccggtccgggcctagaaggccacccggggtcggaggagactagccgttagttagtgcagaccgtctctaatcagtgactagcgacgtcccgacccacccagctttcttgtacaaagtggccgttaacggatcggccagaatggcccggaccgggttaccccggaatcggacctcgggacgtcgccaaagttagctaggtgtccttagcgtttcttaggttctaggcgttaggggtcaataggttagcctagaagtcccgcactaacagcctagcttaacagttccaagctaagccactagactagccctatccgactaacctagtctaagccgaacggggatctaatctaagctaggcacccattagactagttcactagcgcgaccgcactaaactaggctaaaggttaatagcaactagttagctaggggacgttagctgcccaagcttgcataatgaggatcgaggatgaggagcatgcacggatagatggcgtctagcatatcgataggacatgacaagtggtacgatccccgtcacatgtccatggaggcatctgatatggacacggcgtgtatctatcgcggctggaacagaaccagcgctcgcgcggcggtcggcgggagggacagaccttggctccgtgcgttcaggttgtgcttgtgccgcgcgccacgcacggtctccgccgcctgcagctgaaattttagatttacatcctatccctttattttttttatttgtcacaattcagttcaaaaatgaagaacggaggtagtgcatcctttgtgagactaatgaaaatcacatctggatcctgaaatcggcgtcgtaacctacaaggccacggactggattagatagtggtccatggtgcataatgaggatcgaggggtaccagtctaattacaaaactaattgcacaaccgctaagctgaatcgcgagatggatctattaaccttaattagtccatgatttgacaatgtggtgctacaataaccatttgctaatgatggattacttaggtttaatagattcgtctcgtgatttagcctatgggttctgctattaattttgtaattagctcatatttagttcttataattagtatccgaacatccaatgtgacatgctaaagtttaaccctggtatccaaatgaagtcttatgagagtttcatcactccggtggtatatgtacttaggctccgttttcttccaccgacttatttttagcacccgtcacattgaatgtttagatactaattagaagtattaaacgtagactatttacaaaatccattacataagacgaatctaaacggcgagacgaatctattaaacctaattagtccatgatttgacaatgtgttgctacagtaaacatttgctaatgatggattaattaggcttaatagattcgtctcgccgtttagcctccacttatgtaatgggttttctaaacaatctacgtttaatactcctaattagtatctaaatattcaatgtgacacgtgctaaaaataagtcagtggaaggaagagaacgtccccttagttttccatcttattaattgtacgatgaaactgtgcagccagatgattgacaatcgcaatacttcaactagtgggccatgcacatcagcgacgtgtaacgtcgtgagttgctgttcccgtagagaaatatcaactggtgggccacgcacatcagcgtcgtgtaacgtggacggaggagccccgtgacggcgtcgacatcgaacggccaccaaccacggaaccacccgtccccacctctcggaagctccgctccacggcgtcgacatctaacggctaccagcaggcgtacgggttggagtggactccttgcctctttgcgctggcggcttccggaaattgcgtggcggagacgaggcgggctcgtctcacacggcacggaagacgtcacgggttccttccccacctctcctcttccccaccgccataaatagccgaccccctcgcctttctccccaatctcatctcgtctcgtgttgttcggagcacaccacccgccccaaatcgttcttcccgcaagcctcggcgatccttcacccgcttcaaggtacggcgatcgtcttcctcctctagatcggcgtgatctgcaagtagttgatttggtagatggttaggatctgtgcactgaagaaatcatgttagatccgcgatgtttctgttcgtagatggctgggaggtggaatttttgtgtagatctgatatgttctcctgtttatcttgtcacgctcctgcgatttgtggggattttaggtcgttgatctgggaatcgtggggttgcttctaggctgttcgtagatgaggtcgttctcacggtttactggatcattgcctagtagatcagctcgggctttcgtctttgtatatggtgcccatacttgcatctatgatctggttccgtggtgttacctaggtttctgcgcctgattcgtccgatcgattttgttagcatgtggtaaacgtttggtcatggtctgatttagattagagtcgaataggatgatctcgatctagctcttgggattaatatgcatgtgtcaccaatctgttccgtggttaagatgatgaatctatgcttagttaatgggtgtagatatatatgctgctgttcctcaatgatgccgtagcttttacctgagcagcatggttcctcctgttacttaggtagatgcacatgcttatagatcaagatatgtactgctactgttggaattgtttagtatacctgatgatcatccatgctcttgttacttgttttggtatacttggatgatggcatgctgctgctttttgttgatttgagcccatccatatctgcatatgtcacatgattaagatgattacgctgtttctgtatgatgccatagcttttatgtgagcaacatgcatcctcctggttatatgcattaatagatggaagatatctattgctacaatttgatgattattttgtacatacgatgatcaagcatgctcttcatactttgttgatatacttggataatgaaatgctgctgcacgttcattctatagcactaatgatgtgatgaacacgcacgacctgtttgtggcatctgtttgaatgtgttgttgctgttcactagagactgttttattaacctactgctagatacttacccttctgtctgtttattcttttgcaggtcgaccgccggggatccatggttgaacaagatggattgcacgcaggttctccggccgcttgggtggagaggctattcggctatgactgggcacaacagacaatcggctgctctgatgccgccgtgttccggctgtcagcgcaggggcgcccggttctttttgtcaagaccgacctgtccggtgccctgaatgaactgcaggacgaggcagcgcggctatcgtggctggccacgacgggcgttccttgcgcagctgtgctcgacgttgtcactgaagcgggaagggactggctgctattgggcgaagtgccggggcaggatctcctgtcatctcaccttgctcctgccgagaaagtatccatcatggctgatgcaatgcggcggctgcatacgcttgatccggctacctgcccattcgaccaccaagcgaaacatcgcatcgagcgagcacgtactcggatggaagccggtcttgtcgatcaggatgatctggacgaagagcatcaggggctcgcgccagccgaactgttcgccaggctcaaggcgcgcatgcccgacggcgatgatctcgtcgtgacccatggcgatgcctgcttgccgaatatcatggtggaaaatggccgcttttctggattcatcgactgtggccggctgggtgtggcggaccgctatcaggacatagcgttggctacccgtgatattgctgaagagcttggcggcgaatgggctgaccgcttcctcgtgctttacggtatcgccgctcccgattcgcagcgcatcgccttctatcgccttcttgacgagttcttctgagcccatcggtcatggatgcttctactgtacctgggtcgtctggtctctgcctgtgtcacctttgaagtacctgtgtcgggattgtgtttggtctagaactgcagtttgtctttgatgttcttttgtctggtcttatgaactggttgtatctgtatgtttactgtaaactgttgttgcggtgcagcagtatggcatccgaatgaataaatgatgtttggacttaaatctgtactctgtttgttttcggttatgccagttctatattgcctgagatcagaatgtttagcttttgagttctgtttggcttgtggtcgactcctgtttcttacttgaggcgtaactctgttctggcaaactcaaatgtctaactgaatgttttaggacttaattgttggacagattaacgtgtttggtttgtttctagattgtgattcggaaggcttgttagttgtggaatcaaggagagcagctaggtctgtgcagaacgttattttggatttaagccttctcagattatgccattactctaaacctaatgatatcatatttcactcggggatgttggagtagtcttttctttctcctgcagacaaaatgattttgctttcgtgtgtgtacatgattttgtgcaactgttgcaacaactgaagtagacaagttttgacctcaccagaagaatgaaaaagattttggaatttgttacatcgacaaaccattgtaacttggcccatcagaatgcacagagaagcggctacaaattgacatgcgttgcaaactttgcaatagttgatgcacatgtttgccattgcctgccagtcttaggaaaagtgtgtggttcgagaaatctaagcatatgtgctctgctcacattgcgtggaacccacacagctttgtcacactcttgtccactccagaagtcattcctggcgctgtttacccctggtaaagagtaaccgaaaacttctcaaggctgtacccaaaactggaaggaaatttggaggcggccgcatgaggagcaatcattgttcaagacatgatgcaaagctagaaaactttgattgtggccgtccttgtgaagtttaggccggggggaacttcatgaaccctatcgaagcttaattagttcttttttgttgttagccatgtttgtattgtagttaaggtgaacaacatgacgccgcacccgcgatctcagggctcgtccccacacaggagggcacgtcgtcgtcttcgccgccgagcatcagagattcagagcacatacacgcacatctcaagcaaacggagtagtacgtcctactcctacgtacatacctagccgacgacctttatgtgcacaccaccactgctctgctgcccggcctctccgtcgtccgttcatcaccagcataatgaggatcgaggatgaggggcgcgccgacgtcccgaggtccgattccgggctaattaacacctagctcgccactcgactaattagggactaagcctagcgcttagccgttaaaacctagcacaccctaagcacccttagttaggttcccctcttaattaagccctagtgagcccctaagttaaggggacgctaagagccccctaacctagtattcggctagaggcgaactaggctaaacacctaagcgcacctctttaagctagatcgctagggggctaggctagagcttcgctagattagtctaagggcagcctgcagggccctcttgtcggaccagttgcccaccacgttggtgaggggcaactttattatacaaagttgatagataaatcagatatcgaccctagtcacttactgcccttaaggccaattgttcaagattcattcaacaattgaaacatctcccatgattaaatcagtataaggttgctatggtcttgcttgacaaagtttttttttgagggaatttcaactaaatttttgagtgaaactatcaaatactgattttaaaaaatttttataaaaggaagcgcagagataaaaggccatctatgctacaaaagtacccaaaaatgtaatcctaaagtatgaattgcattttttttttgtttggacgaaaggaaaggagtattaccacaagaatgatatcatcttcatatttagatcttttttgggtaaagcttgagattctctaaatatagagaaatcagaagaaaaaaaaaccgtgttttggtggttttgatttctagcctccacaataactttgacggcgtcgacaagtctaacggacaccaagcagcgaaccaccagcgccgagccaagcgaagcagacggccgagacgttgacaccttcggcgcggcatctctcgagagttccgctccggcgctccacctccaccgctggcggtttcttattccgttccgttccgcctcctgctctgctcctctccacaccacacggcacgaaaccgttacggcaccggcagcacccagcacgggagaggggattcctttcccaccgttccttccctttccgccccgccgctataaatagccagccccatccccagcttttttccccaatctcatctcctctctcctgttgttcggagcacacgcacaatccgatcgatccccaaatccccttcgtctctcctcgcgagcctcgtggatcccagcttcaaggtacggcgatcgatcatcccccctccttctctctaccttcttttctctagactacatcggatggcgatccatggttagggcctgctagtttcccttcctgttttgtcgatggctgcgaggcacaatagatctgatggcgttatgacggctaacttgtcatgttgttgcgatttatagtccctttaggagatcagtttaatttctcggatggttcgagatcggtggtccatggttagtaccctaagatccgcgctgttagggttcgtagatggaggcgacctgttctgattgttaacttgtcagtacctgggaaatcctgggatggttctagctcgtccgcagatgagatcgatttcatgatcctctgtatcttgtttcgttgcctaggttccgtctaatctatccgtggtatgatgtagatgttttgatcgtgctaactacgtcttgtaaagttaattgtcaggtcataatttttagcatgcctttttttttgtttggttttgtctaattgggctgtcgttctagatcagagtagaagactgttccaaactacctgctggatttattgaacttggatctgtatgtgtgtcacatatcttcataaattcatgattaagatggattgaaatatcttttatctttttggtatggatagttctatatgttggtgtggctttgttagatgtatacatgcttagatacatgaagcaacgtgctgctactgtttagtaattgctgttcatttgtctaataaacagataaggatatgtatttatgttgctgttggttttgctggtactttgttggatacaaatgcttcaatacagaaaacagcatgctgctacgatttaccatttatctaatcttatcatatgtctaatctaataaacaaacatgcttttaaattatcttcatatgcttggatgatggcatacacagcggctatgtgtggttttttaaatacccagcatcatgggcatgcatgacactgctttaatatgctttttatttgcttgagactgtttcttttgtttatactgaccctttagttcggtgactcttctgcaggtcgactttaacttagcctaggatccatggcccagtccaagcacggcctgaccaaggagatgaccatgaagtaccgcatggagggctgcgtggacggccacaagttcgtgatcaccggcgagggcatcggctaccccttcaagggcaagcaggccatcaacctgtgcgtggtggagggcggccccttgcccttcgccgaggacatcttgtccgccgccttcatgtacggcaaccgcgtgttcaccgagtacccccaggacatcgtcgactacttcaagaactcctgccccgccggctacacctgggaccgctccttcctgttcgaggacggcgccgtgtgcatctgcaacgccgacatcaccgtgagcgtggaggagaactgcatgtaccacgagtccaagttctacggcgtgaacttccccgccgacggccccgtgatgaagaagatgaccgacaactgggagccctcctgcgagaagatcatccccgtgcccaagcagggcatcttgaagggcgacgtgagcatgtacctgctgctgaaggacggtggccgcttgcgctgccagttcgacaccgtgtacaaggccaagtccgtgccccgcaagatgcccgactggcacttcatccagcacaagctgacccgcgaggaccgcagcgacgccaagaaccagaagtggcacctgaccgagcacgccatcgcctccggctccgccttgccctccggactcagatctcgatagggtaccaatggccagttaacagatccagctgctgctgttctagggttcacaagtctgcctatttgtcttccccaatggagctatggttgtctggtctggtccttggtcgtgtcccgtttcattgtgtactatttacctgtaatgtgtatccttaagtctggtttgatggtgtctgaaacgttttgctgtggtagagcagcatggaagaactataatgaataagtgatccctaatcattgtgtccaaattttgcttctgctatacccttttgtgctgtttcttatgttttgcttaaaaatttgatctgacaaacaaatttgtctaaattatgctcttgttctgactgtgtactgtacacatttgtattgctaccggtttggcacatagttttctctttgattgcagatcaaacccttctgattgcagattgcttggctatggctgatgtgctcactgttcttctttagcttgtatattgctgatggtggcttggctacggctgaaaaagttgctgctgcgccgacttggcaactgttgctccagtaatgctttgtcctctcttcctagccgccgacttggcacttggcagctgttgctcctgtaatgcgttgttatctcttatctcttgagatgtactatgattttgaggctgtttgacttgtgccagattgccagtgctgatgctatattatctcaggtttttatgctagtatatgttttactgtgtgctgcctgtgtcgagttacgtaatctattgaaccgctatgcgtgttgatgccctgttgttgcttgccagattgatgcccctgttgcttgcagcttgcaagctgtagtgaaatcctaaaattcgaaaccaaatctattctgaacttttgaagatctgtgatgtccggaagaaaagattcaaacagataaacgggactctccagaatctataaaataaatgatcgacaaacgctttgctttggtaggcttcctagttagttagcggaccgaagcttcggttgtttctgtggccgaattcaatcactagagtcgacctgcatgattccgatgacttcgtaggttcctagctcaagccgctcgtgtccaagcgtcacttacgattagctaatgattacggcatctaggaccgactagctagctagctaagagctcggtaccgagctcgaattcattccgattaatcgtggcctcttgctcttcaggatgaagagctatgtttaaacgtgcaagcgctactagacaattcagtacattaaaaacgtccgcaatgtgttattaagttgtctaagcgtcaatttgtttacaccacaatatatcctgcca

SEQ ID NO: 284 - DNA, 20851 bp, Artificial Sequence
  PHP97978
gtttacccgccaatatatcctgtcaaacactgcggccgcacttgaccgcggatggagccggagctgtggtgaggccatcgacgggaggtgggggagaacacagtctcagtgttctttgtgagtccgcaaggtttttagcttttctgtattaattaaggttgctgttggctgtagaatacggtcgtggaagagctgtatcggtagctactacgtaagctattatatactggaagtctggagctcgtcgatctccggtcgtcttcctccatttctcctcgtcttgctttgactgctgctaccatttgcttctgttttctgatgaagcatgccatgtcggccaccagtgtttgtgtggtttttgcagggaatggctttcaagtgctgtgattgaatggccctcgtcgtcctcggctgagctcacatggacgcgtcatgtgagtgagatatatgatcatatgatgagtggggttcgggtgagtgcgtacttgaagtaggatcccgctttcactcattcattcattggcctttaaaccgggaaattttcgcgaggagatggagggaagcaagcagggtgacgagtgcagagtgccgcgagcgctttgtcaaaaggcaccgccgtaggcaaaaaaatcaatggccctgactgactcgatggtagtactactgtagagactagagagggttgctccccatatcttcgtgtgacttttactccagcattgcatttccgtcattgagacgttaattaatagcagctttcgggacagatgactgtggccatgtttcgtcacggccgcttcgtgccagctgggggtactatagtactgtgattttgttagtaaaaactttcattaggccaccattgacgaccgggccttcgcttttgctgcgctaattaaccatttcccggcgaccgaagggaacatgaacatgccccgacacatgagggcatgaggactagtgttctccctgtcgttcgttgacttgactagtgatagtttaaacgctcttcaactggaagagcggttactaccggttcactagctagctgctaatcgagctagttaccctatgaggtgacatgaagcgctcacggttactatgacggttagcttcacgactgttggtggcagtagcgtacgacttagctatagttccggacttacctagctaataacttcgtatagcatacattatacgaagttatggttacctcgcgacggaccgggttaccaagcggccgcacactgatagtttaaactgaaggcgggaaacgacaatctgatcatgagcggagaattaagggagtcacgttatgacccccgccgatgacgcgggacaagccgttttacgtttggaactgacagaaccgcaacgattgaaggagccactcagccgcgggtttctggagtttaatgagctaagcacatacgtcagaaaccattattgcgcgttcaaaagtcgcctaaggtcactatcagctagcaaatatttcttgtcaaaaatgctccactgacgttccataaattcccctcggtatccaattagagtctcatattcactcccatggcggccaatgcgggcggcggtggagcgggaggaggcagcggcagcggcagcgtggctgcgccggcggtgtgccgccccagcggctcgcggtggacgccgacgccggagcagatcaggatgctgaaggagctctactacggctgcggcatccggtcgcccagctcggagcagatccagcgcatcaccgccatgctgcggcagcacggcaagatcgagggcaagaacgtcttctactggttccagaaccacaaggcccgcgagcgccagaagcgccgcctcaccagcctcgacgtcaacgtgcccgccgccggcgcggccgacgccaccaccagccaactcggcgtcctctcgctgtcgtcgccgccgccttcaggcgcggcgcctccctcgcccaccctcggcttctacgccgccggcaatggcggcggatcggctgtgctgctggacacgagttccgactggggcagcagcggcgctgctatggccaccgagacatgcttcctgcaggactacatgggcgtgacggacacgggcagctcgtcgcagtggccacgcttctcgtcgtcggacacgataatggcggcggccgcggcgcgggcggcgacgacgcgggcgcccgagacgctccctctcttcccgacctgcggcgacgacggcggcagcggtagcagcagctacttgccgttctggggtgccgcgtccacaactgccggcgccacttcttccgttgcgatccaacagcaacaccagctgcaggagcagtacagcttttacagcaacagcaacagcacccagctggccggcaccggcaaccaagacgtatcggcaacagcagcagcagccgccgccctggagctgagcctcagctcatggtgctccccttaccctgctgcagggagtatgtgagagcaacgcgagctgccactgctcttcactgatgtctctggaatggaaggaggaggaagtgagaacagatcattcgacaaagcagcattagtccgttgatcggtggaagaccactcgtcagtgttgagttgaatgtttgatcaataaaatacggcaatgctgtaagggttgttttttatgccattgataatacactgtactgttcagttgttgaactctatttcttagccatgccaagtgcttttcttattttgaataacattacagcaaaaagttgaaagacaaaaaaaaaaacccccgaacagagtgctttgggtcccaagcttctttagactgtgttcggcgttccccctaaatttctccccctatatctcactcacttgtcacatcagcgttctctttccccctatatctccacgctctacagcagttccacctatatcaaacctctataccccaccacaacaatattatatactttcatcttcaactaactcatgtaccttccaatttttttctactaataattatttacgtgcacagaaacttagcaaggagagagagagcgggaatttaaatgctcggcgttaggcttttagtccgctaggtggctagaccgaggttaggacgctagttcactaggggcctagtggtgttttaagacgtcacggtcaccacgcgtggaccgaagcttgcatgcctgcagtgcagcgtgacccggtcgtgcccctctctagagataatgagcattgcatgtctaagttataaaaaattaccacatattttttttgtcacacttgtttgaagtgcagtttatctatctttatacatatatttaaactttactctacgaataatataatctatagtactacaataatatcagtgttttagagaatcatataaatgaacagttagacatggtctaaaggacaattgagtattttgacaacaggactctacagttttatctttttagtgtgcatgtgttctcctttttttttgcaaatagcttcacctatataatacttcatccattttattagtacatccatttagggtttagggttaatggtttttatagactaatttttttagtacatctattttattctattttagcctctaaattaagaaaactaaaactctattttagtttttttatttaataatttagatataaaatagaataaaataaagtgactaaaaattaaacaaataccctttaagaaattaaaaaaactaaggaaacatttttcttgtttcgagtagataatgccagcctgttaaacgccgtcgacgagtctaacggacaccaaccagcgaaccagcagcgtcgcgtcgggccaagcgaagcagacggcacggcatctctgtcgctgcctctggacccctctcgagagttccgctccaccgttggacttgctccgctgtcggcatccagaaattgcgtggcggagcggcagacgtgagccggcacggcaggcggcctcctcctcctctcacggcaccggcagctacgggggattcctttcccaccgctccttcgctttcccttcctcgcccgccgtaataaatagacaccccctccacaccctctttccccaacctcgtgttgttcggagcgcacacacacacaaccagatctcccccaaatccacccgtcggcacctccgcttcaaggtacgccgctcgtcctcccccccccccctctctaccttctctagatcggcgttccggtccatgcatggttagggcccggtagttctacttctgttcatgtttgtgttagatccgtgtttgtgttagatccgtgctgctagcgttcgtacacggatgcgacctgtacgtcagacacgttctgattgctaacttgccagtgtttctctttggggaatcctgggatggctctagccgttccgcagacgggatcgatttcatgattttttttgtttcgttgcatagggtttggtttgcccttttcctttatttcaatatatgccgtgcacttgtttgtcgggtcatcttttcatgcttttttttgtcttggttgtgatgatgtggtctggttgggcggtcgttctagatcggagtagaattctgtttcaaactacctggtggatttattaattttggatctgtatgtgtgtgccatacatattcatagttacgaattgaagatgatggatggaaatatcgatctaggataggtatacatgttgatgcgggttttactgatgcatatacagagatgctttttgttcgcttggttgtgatgatgtggtgtggttgggcggtcgttcattcgttctagatcggagtagaatactgtttcaaactacctggtgtatttattaattttggaactgtatgtgtgtgtcatacatcttcatagttacgagtttaagatggatggaaatatcgatctaggataggtatacatgttgatgtgggttttactgatgcatatacatgatggcatatgcagcatctattcatatgctctaaccttgagtacctatctattataataaacaagtatgttttataattattttgatcttgatatacttggatgatggcatatgcagcagctatatgtggatttttttagcactgccttcatacgctatttatttgcttggtactgtttcttttgtcgatgctcaccctgttgtttggtgttacttctgcaggtcgactttaacttagcctaggatccatggccactgtgaacaactggctcgctttctccctctccccgcaggagctgccgccctcccagacgacggactccacactcatctcggccgccaccgccgaccatgtctccggcgatgtctgcttcaacatcccccaagattggagcatgaggggatcagagctttcggcgctcgtcgcggagccgaagctggaggacttcctcggcggcatctccttctccgagcagcatcacaaggccaactgcaacatgatacccagcactagcagcacagtttgctacgcgagctcaggtgctagcaccggctaccatcaccagctgtaccaccagcccaccagctcagcgctccacttcgcggactccgtaatggtggcttcctcggccggtgtccacgacggcggtgccatgctcagcgcggccgccgctaacggtgtcgctggcgctgccagtgccaacggcggcggcatcgggctgtccatgattaagaactggctgcggagccaaccggcgcccatgcagccgagggtggcggcggctgagggcgcgcaggggctctctttgtccatgaacatggcggggacgacccaaggcgctgctggcatgccacttctcgctggagagcgcgcacgggcgcccgagagtgtatcgacgtcagcacagggtggagccgtcgtcgtcacggcgccgaaggaggatagcggtggcagcggtgttgccggcgctctagtagccgtgagcacggacacgggtggcagcggcggcgcgtcggctgacaacacggcaaggaagacggtggacacgttcgggcagcgcacgtcgatttaccgtggcgtgacaaggcatagatggactgggagatatgaggcacatctttgggataacagttgcagaagggaagggcaaactcgtaagggtcgtcaagtctatttaggtggctatgataaagaggagaaagctgctagggcttatgatcttgctgctctgaagtactggggtgccacaacaacaacaaattttccagtgagtaactacgaaaaggagctcgaggacatgaagcacatgacaaggcaggagtttgtagcgtctctgagaaggaagagcagtggtttctccagaggtgcatccatttacaggggagtgactaggcatcaccaacatggaagatggcaagcacggattggacgagttgcagggaacaaggatctttacttgggcaccttcagcacccaggaggaggcagcggaggcgtacgacatcgcggcgatcaagttccgcggcctcaacgccgtcaccaacttcgacatgagccgctacgacgtgaagagcatcctggacagcagcgccctccccatcggcagcgccgccaagcgcctcaaggaggccgaggccgcagcgtccgcgcagcaccaccacgccggcgtggtgagctacgacgtcggccgcatcgcctcgcagctcggcgacggcggagccctggcggcggcgtacggcgcgcactaccacggcgccgcctggccgaccatcgcgttccagccgggcgccgccagcacaggcctgtaccacccgtacgcgcagcagccaatgcgcggcggcgggtggtgcaagcaggagcaggaccacgcggtgatcgcggccgcgcacagcctgcaggacctccaccacctgaacctgggcgcggccggcgcgcacgactttttctcggcagggcagcaggccgccgccgctgcgatgcacggcctgggtagcatcgacagtgcgtcgctcgagcacagcaccggctccaactccgtcgtctacaacggcggggtcggcgacagcaacggcgccagcgccgtcggcggcagtggcggtggctacatgatgccgatgagcgctgccggagcaaccactacatcggcaatggtgagccacgagcaggtgcatgcacgggcctacgacgaagccaagcaggctgctcagatggggtacgagagctacctggtgaacgcggagaacaatggtggcggaaggatgtctgcatgggggactgtcgtgtctgcagccgcggcggcagcagcaagcagcaacgacaacatggccgccgacgtcgggcatggcggcgcgcagctcttcagtgtctggaacgacacttaagcgtacctagtggtacctgacatcttatagtctgcaacctctcgtgtctgaattcctatctttatcaagtgttattgcttccacgactataggacagctttcgtcgaaagcttttgctcatgtgatctcgaaggattcatctagtctgatttttcgtgacttgtatcggttttattggattcatccaacatatatcaataaaaaatgagttgtgtttcctttcttcctagttcagttaaaattatttccctcctgcgcttgtgctgtaattgtctgtgtacctgttgtttgtgactgtgttagttcccttggatatgatttcgtatttgatatgtacatggagatagcttagcttcattattggagtatgaagttagtatgacatagtcactctcctggaaaattgacactgcaaaccatatttttattctgaaccacaaatcctagtcagtccgctggcatatgccgtccgtttgctgaatccagaacgtgggtttggagatgtacggctgagatgcctctatgcgaaggggatttcgtggtgaaacgagatgggagtagagcaacgcccgtggaagatgcttcaaacttccacacttttgagcaacgatcggcagtagtaaggtagacgatttcaagatcaaagcatatgaagataaacaacatcaacaacaaaatttgttggggttctatagagagaaacagagctacatacatacactgttttgtatctaccatctgagatgatgaaaagatgaaaaactaaagaatgccccggcgccaacgccaggacacgccgcgcgcgcgtcacccgagccatctcttgacccagccggcgctgtatatttacacacgttgcagcatcgatcaccacctgttcgatcgcgtcgccgtcaccggcgcgccgcgacttattgaactagtctagggcgcggctaacaacctagcttagattgccttgtctaaacccttaaggctaacgcgccactctagattcttatgtgcttctagtctccaaatgtggttgatagttattttgctctaagatcaacagtaatgaagtataaatcatcgttgtggtgtgctactcggttaattgagcattaacacacacaaacatgacgaggatggtataatctccaaaaatgtgtactttgttaggtgggaccctatagccttgattaatgtgctatgttaggcatgcctggaaacgtgtgacgcatatgttttgtgaacctgttgatattatatgtgcttttatattaccatattttattaaaatactaatatttattactagtaagatataacattctatctagcttaaaaactaaccataaatattccataataactagatttaccaaactaatatactaaatatacataataaatacaaaattaacaagacaataatcaatatttatgagcttaatatatttagacattatggttggtcgacgataatcatgctaacttttcgtaattgcttgattgaaatatgcttagaataatgcctctttgttctacatggcaaatagggaccattatggtgtaacaccctgggaaccacaaacaccccgaaatgctactaaactacacaactaaccttcatatataaaatttcgacagcatctcctttgaaaatttgcatagacgtggaagcaacagagtataaacagatatcatgataagaaaacatactagacattaataatctgctagaaatgggaagaatcgagctcggtaccctggttcacaaactcaatacaacacacagtggagtagggtattacgctccggcggcccgaaccactctaaatccttgtgtcctcgtgtgctcttccaccattaatgactgtaattgcagggacacgaagagttgtagcgcttttgccaacaagatccgctatatgctagtagagtggaacctgcacagcaacaagcatccaataatctgagaataagaattatgtgtggtgatggttctcatctctgcaactcgccattttcgcgagagaaccaaatccaagttggtgaagatcatgatttgggctcatgggctggcatagtagctattacctttgcaattgtggttcgaatctatccgatattctccttttcagggagagctaatgcttatgcttattgggtattttggtttgacactgcttcacgcccaaaaaaaggcaactatgtctgagttggatatggcccaaaaaaaggcagctatgtctgagttggatatggaagtcttctttcgtttagggtgaagtaagaccaagctcatgagcttattatcttaggtcggaacaaattagttgataggcatggcacatttatcaaattataatgattttaacagaaaagcaacacctctttttcagcagcaccagctttgcaagctgcaattgacactccaagcatagtatttgctccaaactcagcctgcatttcgcacaatatcatatctatttccatttggataaaatatattttccagaaatatgggaacagaatcaagatacagaaaaaagttgtggtagtagtggtaagtggaaacacaagtacagtgaaaagatagcattatttctgaacagtcaaattaaccgaaataagtagtatcacatactgcccctaaattgactacacccaatgtaaagaattgcttgagcatattgagccatcagttgtttgtttgtgtaacggatttgacaatgcagagttcaggagcaaaaaaccgcaaaggagagaaagagggaaaggatctcctagtatcccaccttgtggcgcgccctgtcaagtgcatgatggcctggtcgatctgcgtctgctgctgcggttccatcccaacgagtgcctccgacaccttgtcgttgatcacccgcaccgcgtaggcgacccccctggcgaggaacttccgcctctcggaggccccggccgcgtcggcggcggcgccctcgagcgcgcccacgctagccgtagatgctcggtgcacggccttgttggtgtgcaactcgacctcaacggccggtgcgctacgcccgtcaaggatctggcgcgcccgcaccctcgtgatcacggtgggcgcctcccgcctcatgtggccgacgatgaaaagcgccgggttaggggccttggcgcgcaccgccgtattcagggcctcctcgctcttgcgcgagagcaggtgcttccccaggtactcctgcactgacaaggctgccacagcggtggaatttgtcctcacgacttcgccacgtcgtcctcacctccctggcttcccacgactccgccgtatcgaggtgctcggtgggtcgtcttaatccgaagtccgaactaggaagacgagacagagaggtctgaggaatgggcctcgtttgatgttgagctgaattatttttccagcataagcccaggtcttggtccatgaacaaaattactagaaacccagcccagtactacgatctaaaagagggactgccactggatagctctctctagcattctccacgctccaatacagcggcgtcgtgtctatccgggtctatccgcgaacacgtgagaactctccagaaactgctttctcctccacttcatctctctcgctttccctctataaaaagaccccttctaggaattgagggagacagcaagcaccaagcagcgatccgaagctcaatcaattcactcaaacctcttccccaaatcttcgattagatcttcgttgacaagaagactagaaccgaacctgacatgtccaacctgctcacggttcaccagaaccttccggctcttccagtggacgcgacgtccgatgaagtcaggaagaacctcatggacatgttccgcgacaggcaagcgttcagcgagcacacctggaagatgctgctctccgtctgccgctcctgggctgcatggtgcaagctgaacaacaggaagtggttccccgctgagcccgaggacgtgagggattaccttctgtacctgcaagcgcgaggtttgtttctgcttctacctttgatatatatataataattatcattaattagtagtaatataatatttcaaatatttttttcaaaataaaagaatgtagtatatagcaattgcttttctgtagtttataagtgtgtatattttaatttataacttttctaatatatgaccaaaacatggtgatgcctaggtctggcagtgaagaccatccagcaacaccttggacaactgaacatgcttcacaggcgctccggcctcccgcgccccagcgactcgaacgccgtgagcctcgtcatgcgccgcatcaggaaggaaaacgtcgatgccggcgaaagggcaaagcaggccctcgcgttcgagaggaccgatttcgaccaggtccgcagcctgatggagaacagcgacaggtgccaggacattaggaacctggcgttcctcggaattgcatacaacacgctcctcaggatcgcggaaattgcccgcattcgcgtgaaggacattagccgcaccgacggcggcaggatgcttatccacattggcaggaccaagacgctcgtttccaccgcaggcgtcgaaaaggccctcagcctcggagtgaccaagctcgtcgaacgctggatctccgtgtccggcgtcgcggacgacccaaacaactacctcttctgccgcgtccgcaagaacggggtggctgcccctagcgccaccagccaactcagcacgagggccttggaaggtattttcgaggccacccaccgcctgatctacggcgcgaaggatgacagcggtcaacgctacctcgcatggtccgggcactccgcccgcgttggagctgctagggacatggcccgcgccggtgtttccatccccgaaatcatgcaggcgggtggatggacgaacgtgaacattgtcatgaactacattcgcaaccttgacagcgagacgggcgcaatggttcgcctcctggaagatggtgactgaggtacccaacctagacttgtccatcttctggattggccaacttaattaatgtatgaaataaaaggatgcacacatagtgacatgctaatcactataatgtgggcatcaaagttgtgtgttatgtgtaattactagttatctgaataaaagagaaagagatcatccatatttcttatcctaaatgaatgtcacgtgtctttataattctttgatgaaccagatgcatttcattaaccaaatccatatacatataaatattaatcatatataattaatatcaattgggttagcaaaacaaatctagtctaggtgtgttttgcgatccgatatcgacgtctaaaaacggcccctaactaacgcttagttgcccgctagattagtcccccgttagtgcctagttagacacacgacgaactaggggctagccccgggataacttcgtatagcatacattatacgaagttatgaattccggaccgggttaccgaattcctgcccttaaggccaattgttcaagattcattcaacaattgaaacatctcccatgattaaatcagtataaggttgctatggtcttgcttgacaaagtttttttttgagggaatttcaactaaatttttgagtgaaactatcaaatactgattttaaaaaatttttataaaaggaagcgcagagataaaaggccatctatgctacaaaagtacccaaaaatgtaatcctaaagtatgaattgcattttttttttgtttggacgaaaggaaaggagtattaccacaagaatgatatcatcttcatatttagatcttttttgggtaaagcttgagattctctaaatatagagaaatcagaagaaaaaaaaaccgtgttttggtggttttgatttctagcctccacaataactttgacggcgtcgacaagtctaacggacaccaagcagcgaaccaccagcgccgagccaagcgaagcagacggccgagacgttgacaccttcggcgcggcatctctcgagagttccgctccggcgctccacctccaccgctggcggtttcttattccgttccgttccgcctcctgctctgctcctctccacaccacacggcacgaaaccgttacggcaccggcagcacccagcacgggagaggggattcctttcccaccgttccttccctttccgccccgccgctataaatagccagccccatccccagcttttttccccaatctcatctcctctctcctgttgttcggagcacacgcacaatccgatcgatccccaaatccccttcgtctctcctcgcgagcctcgtggatcccagcttcaaggtacggcgatcgatcatcccccctccttctctctaccttcttttctctagactacatcggatggcgatccatggttagggcctgctagtttcccttcctgttttgtcgatggctgcgaggcacaatagatctgatggcgttatgacggctaacttgtcatgttgttgcgatttatagtccctttaggagatcagtttaatttctcggatggttcgagatcggtggtccatggttagtaccctaagatccgcgctgttagggttcgtagatggaggcgacctgttctgattgttaacttgtcagtacctgggaaatcctgggatggttctagctcgtccgcagatgagatcgatttcatgatcctctgtatcttgtttcgttgcctaggttccgtctaatctatccgtggtatgatgtagatgttttgatcgtgctaactacgtcttgtaaagttaattgtcaggtcataatttttagcatgcctttttttttgtttggttttgtctaattgggctgtcgttctagatcagagtagaagactgttccaaactacctgctggatttattgaacttggatctgtatgtgtgtcacatatcttcataaattcatgattaagatggattgaaatatcttttatctttttggtatggatagttctatatgttggtgtggctttgttagatgtatacatgcttagatacatgaagcaacgtgctgctactgtttagtaattgctgttcatttgtctaataaacagataaggatatgtatttatgttgctgttggttttgctggtactttgttggatacaaatgcttcaatacagaaaacagcatgctgctacgatttaccatttatctaatcttatcatatgtctaatctaataaacaaacatgcttttaaattatcttcatatgcttggatgatggcatacacagcggctatgtgtggttttttaaatacccagcatcatgggcatgcatgacactgctttaatatgctttttatttgcttgagactgtttcttttgtttatactgaccctttagttcggtgactcttctgcaggtcgactttaacttagcctaggatccatggcccagtccaagcacggcctgaccaaggagatgaccatgaagtaccgcatggagggctgcgtggacggccacaagttcgtgatcaccggcgagggcatcggctaccccttcaagggcaagcaggccatcaacctgtgcgtggtggagggcggccccttgcccttcgccgaggacatcttgtccgccgccttcatgtacggcaaccgcgtgttcaccgagtacccccaggacatcgtcgactacttcaagaactcctgccccgccggctacacctgggaccgctccttcctgttcgaggacggcgccgtgtgcatctgcaacgccgacatcaccgtgagcgtggaggagaactgcatgtaccacgagtccaagttctacggcgtgaacttccccgccgacggccccgtgatgaagaagatgaccgacaactgggagccctcctgcgagaagatcatccccgtgcccaagcagggcatcttgaagggcgacgtgagcatgtacctgctgctgaaggacggtggccgcttgcgctgccagttcgacaccgtgtacaaggccaagtccgtgccccgcaagatgcccgactggcacttcatccagcacaagctgacccgcgaggaccgcagcgacgccaagaaccagaagtggcacctgaccgagcacgccatcgcctccggctccgccttgccctccggactcagatctcgatagggtaccaatggccagttaacagatccagctgctgctgttctagggttcacaagtctgcctatttgtcttccccaatggagctatggttgtctggtctggtccttggtcgtgtcccgtttcattgtgtactatttacctgtaatgtgtatccttaagtctggtttgatggtgtctgaaacgttttgctgtggtagagcagcatggaagaactataatgaataagtgatccctaatcattgtgtccaaattttgcttctgctatacccttttgtgctgtttcttatgttttgcttaaaaatttgatctgacaaacaaatttgtctaaattatgctcttgttctgactgtgtactgtacacatttgtattgctaccggtttggcacatagttttctctttgattgcagatcaaacccttctgattgcagattgcttggctatggctgatgtgctcactgttcttctttagcttgtatattgctgatggtggcttggctacggctgaaaaagttgctgctgcgccgacttggcaactgttgctccagtaatgctttgtcctctcttcctagccgccgacttggcacttggcagctgttgctcctgtaatgcgttgttatctcttatctcttgagatgtactatgattttgaggctgtttgacttgtgccagattgccagtgctgatgctatattatctcaggtttttatgctagtatatgttttactgtgtgctgcctgtgtcgagttacgtaatctattgaaccgctatgcgtgttgatgccctgttgttgcttgccagattgatgcccctgttgcttgcagcttgcaagctgtagtgaaatcctaaaattcgaaaccaaatctattctgaacttttgaagatctgtgatgtccggaagaaaagattcaaacagataaacgggactctccagaatctataaaataaatgatcgacaaacgctttgctttggtaggcttcctagttagttagcggaccgaagcttcggtccgggcctagaaggccagcttcggccgcccctcggtaccctgggatctgcccttactttaacgcctctaaccaacacccctttatctttataaggaacaataaacagaatttgccccactgttctaaatcacctaataatatccccagctaaaaacaataaaggtttcctagaattaagacaagcatgactgttcctccaggagggtttggaacattgttgcagtcttgcagatacgggcgaagggtgagaaacagagcggagggctggaggtgacctcggtagtcgacgccggagttgagcttgacaacgacggggcggcccctgatggacttgaggaagtccgatggcgtcttcaccgtcccgccggcgcccgaggcgggcctgtcgctgccgccgccgccgctgctcatcttgcgcgctgtgcccccggcggtgtccctgtgttgcggatcgcgggtgggccaggtggatgcgagggcgacccgtttggactccggccggagccgccggatccctggtcggtgtcagtgccgtttactctgggccccacgtgtcagtaccgtctgtagatgacaacaacccgtcgtccacagtcatgtccaaaatatcctttcttcttttttttcgattcggatatctatcttccttttttttttccaaaaatcttcttgacgcaccagcgcgcacgtttgtggtaaacgccgacacgtcggtcccacgtcgatagaccccacccaccagtgagtagcgtgtacgtattcgggggtgacggacgtgtcgccgtcgtcttgctagtcccattcccatctgagccacacatctctgaacaaaaaaaaggagggaggcctccacgcacatccccctccgtgccacccgccccaaaccctcgcgccgcctccgagacagccgccgcaaccatggccaccgccgccgccgcgtctaccgcgctcactggcgccactaccgctgcgcccaaggcgaggcgccgggcgcacctcctggccacccgccgcgccctcgccgcgcccatcaggtgctcagcggcgtcacccgccatgccgatggctcccccggccaccccgctccggccgtggggccccaccgagccccgcaagggtgctgacatcctcgtcgagtccctcgagcgctgcggcgtccgcgacgtcttcgcctaccccggcggcgcgtccatggagatccaccaggcactcacccgctcccccgtcatcgccaaccacctcttccgccacgagcaaggggaggcctttgccgcctccggctacgcgcgctcctcgggccgcgtcggcgtctgcatcgccacctccggccccggcgccaccaacctagtctccgcgctcgccgacgcgctgctcgattccgtccccatggtcgccatcacgggacaggtggcgcgacgcatgattggcaccgacgccttccaggagacgcccatcgtcgaggtcacccgctccatcaccaagcacaactacctggtcctcgacgtcgacgacatcccccgcgtcgtgcaggaggctttcttcctcgcctcctctggtcgaccagggccggtgcttgtcgacatccccaaggacatccagcagcagatggcggtgcctgtctgggacaagcccatgagtctgcctgggtacattgcgcgccttcccaagccccctgcgactgagttgcttgagcaggtgctgcgtcttgttggtgaatcgcggcgccctgttctttatgtgggcggtggctgcgcagcatctggtgaggagttgcgacgctttgtggagctgactggaatcccggtcacaactactcttatgggcctcggcaacttccccagcgacgacccactgtctctgcgcatgctaggtatgcatgggacggtgtatgcaaattatgcagtggataaggccgatctgttgcttgcacttggtgtgcggtttgatgatcgcgtgacagggaagattgaggcttttgcaagcagggctaagattgtgcacgttgatattgatccggctgagattggcaagaacaagcagccacatgtgtccatctgtgcagatgttaagcttgctttgcagggcatgaatgctcttcttgaaggaagcacatcaaagaagagctttgactttggctcatggaacgatgagttggatcagcagaagagggaattcccccttgggtataaaacatctaatgaggagatccagccacaatatgctattcaggttcttgatgagctgacgaaaggcgaggccatcatcggcacaggtgttgggcagcaccagatgtgggcggcacagtactacacttacaagcggccaaggcagtggttgtcttcagctggtcttggggctatgggatttggtttgccggctgctgctggtgcttctgtggcaaacccaggtgtcactgttgttgacatcgatggagatggtagctttctcatgaacgttcaggagctagctatgatccgaattgagaacctcccagtgaaggtctttgtgctaaacaaccagcacctggggatggtggtgcagttggaggacaggttctataaggccaacagagcgcacacatacttgggaaacccagagaatgaaagtgagatatatccagatttcgtgacgatcgccaaagggttcaacattccagcggtccgtgtgacaaagaagaacgaagtccgcgcagcgataaagaagatgctcgagactccagggccgtacctcttggatataatcgtcccacaccaggagcatgtgttgcctatgatccctagtggtggggctttcaaggatatgatcctggatggtgatggcaggactgtgtactgactagctagtcagttaacagatcctctagtgccgtgggtcgtttaagctgccgctgtacctgtgtcgtctggtgccttctggtgtacctgggaggttgtcgtctatcaagtatctgtggttggtgtcatgagtcagtgagtcccaatactgttcgtgtcctgtgtgcattatacccaaaactgttatgggcaaatcatgaataagcttgatgttcgaacttaaaagtctctgctcaatatggtattatggttgtttttgttcgtctcctaatatttgcctgggatcaaattttattggctggtgttcatttgacctccatgttcttgctaggctccattttttactctacagccataatatgtttgattgtttggtttgttctttgttgtacacctggttctgtcgagcttagttttcgacactggcttacagcttaacatgttgctattttattgggttctgattgctattttattgggttctgattgctagtttttgctgaatccaaaaaccatgttatttatttaagcgatccaggttattattatgatggtggctaagtttttttttttccaagggtaaattttctggattctccagtgtttctgtggccgaattcaatcactagagtcgacctgcaggccggtccgggcctagaaggcccgcgccacttacgcttgattccgatgacttcgtaggttcctagctcaagccgctcgtgtccaagcgtcacttacgattagctaatgattacggcatctaggaccgactagttcttatgtgcttctagtctccaaatgtggttgatagttattttgctctaagatcaacagtaatgaagtataaatcatcgttgtggtgtgctactcggttaattgagcattaacacacacaaacatgacgaggatggtataatctccaaaaatgtgtactttgttaggtgggaccctatagccttgattaatgtgctatgttaggcatgcctggaaacgtgtgacgcatatgttttgtgaacctgttgatattatatgtgcttttatattaccatattttattaaaatactaatatttattactagtaagatataacattctatctagcttaaaaactaaccataaatattccataataactagatttaccaaactaatatactaaatatacataataaatacaaaattaacaagacaataatcaatatttatgagcttaatatatttagacattatggttggtcgacgataatcatgctaacttttcgtaattgcttgattgaaatatgcttagaataatgcctctttgttctacatggcaaatagggaccattatggtgtaacaccctgggaaccacaaacaccccgaaatgctactaaactacacaactaaccttcatatataaaatttcgacagcatctcctttgaaaatttgcatagacgtggaagcaacagagtataaacagatctgcgtttaaacgtgcaagcgctactagacaattcagtacattaaaaacgtccgcaatgtgttattaagttgtctaagcgtcaatttgtttacaccacaatatatcctgcca

SEQ ID NO: 285 - DNA, 20224 bp, Artificial Sequence
  PHP101270
gtttacccgccaatatatcctgtcaaacactgcggccgcacttgaccgcggatggagccggagctgtggtgaggccatcgacgggaggtgggggagaacacagtctcagtgttctttgtgagtccgcaaggtttttagcttttctgtattaattaaggttgctgttggctgtagaatacggtcgtggaagagctgtatcggtagctactacgtaagctattatatactggaagtctggagctcgtcgatctccggtcgtcttcctccatttctcctcgtcttgctttgactgctgctaccatttgcttctgttttctgatgaagcatgccatgtcggccaccagtgtttgtgtggtttttgcagggaatggctttcaagtgctgtgattgaatggccctcgtcgtcctcggctgagctcacatggacgcgtcatgtgagtgagatatatgatcatatgatgagtggggttcgggtgagtgcgtacttgaagtaggatcccgctttcactcattcattcattggcctttaaaccgggaaattttcgcgaggagatggagggaagcaagcagggtgacgagtgcagagtgccgcgagcgctttgtcaaaaggcaccgccgtaggcaaaaaaatcaatggccctgactgactcgatggtagtactactgtagagactagagagggttgctccccatatcttcgtgtgacttttactccagcattgcatttccgtcattgagacgttaattaatagcagctttcgggacagatgactgtggccatgtttcgtcacggccgcttcgtgccagctgggggtactatagtactgtgattttgttagtaaaaactttcattaggccaccattgacgaccgggccttcgcttttgctgcgctaattaaccatttcccggcgaccgaagggaacatgaacatgccccgacacatgagggcatgaggactagtgttctccctgtcgttcgttgacttgactagtgatagtttaaacgctcttcaactggaagagcggttactaccggttcactagctagctgctaatcgagctagttaccctatgaggtgacatgaagcgctcacggttactatgacggttagcttcacgactgttggtggcagtagcgtacgacttagctatagttccggacttacccttaagataacttcgtatagcatacattatacgaagttatgggcccacgcgtgaagagcggttaccagagctggtcacctttgtccaccaagatggaactgtcttcggccagaatggccatctggattcagcaggcctagaaggccatttatcgctatcaactttgtatagaaaagttgggccgaattcgagctcggtacggccagaatggcccggaccgaagcttgcggccgcacactgatagtttaaactgaaggcgggaaacgacaatctgatcatgagcggagaattaagggagtcacgttatgacccccgccgatgacgcgggacaagccgttttacgtttggaactgacagaaccgcaacgttgaaggagccactcagccgcgggtttctggagtttaatgagctaagcacatacgtcagaaaccattattgcgcgttcaaaagtcgcctaaggtcactatcagctagcaaatatttcttgtcaaaaatgctccactgacgttccataaattcccctcggtatccaattagagtctcatattcactctcccgggggatctcgactctagaggatcgctcaggaaggccgctgagatagaggcatggcggccaatgcgggcggcggtggagcgggaggaggcagcggcagcggcagcgtggctgcgccggcggtgtgccgccccagcggctcgcggtggacgccgacgccggagcagatcaggatgctgaaggagctctactacggctgcggcatccggtcgcccagctcggagcagatccagcgcatcaccgccatgctgcggcagcacggcaagatcgagggcaagaacgtcttctactggttccagaaccacaaggcccgcgagcgccagaagcgccgcctcaccagcctcgacgtcaacgtgcccgccgccggcgcggccgacgccaccaccagccaactcggcgtcctctcgctgtcgtcgccgccgccttcaggcgcggcgcctccctcgcccaccctcggcttctacgccgccggcaatggcggcggatcggctgtgctgctggacacgagttccgactggggcagcagcggcgctgccatggccaccgagacatgcttcctgcaggactacatgggcgtgacggacacgggcagctcgtcgcagtggccacgcttctcgtcgtcggacacgataatggcggcggccgcggcgcgggcggcgacgacgcgggcgcccgagacgctccctctcttcccgacctgcggcgacgacggcggcagcggtagcagcagctacttgccgttctggggtgccgcgtccacaactgccggcgccacttcttccgttgcgatccagcagcaacaccagctgcaggagcagtacagcttttacagcaacagcaacagcacccagctggccggcaccggcaaccaagacgtatcggcaacagcagcagcagccgccgccctggagctgagcctcagctcatggtgctccccttaccctgctgcagggagtatgtgagagcaacgcgagctgccactgctcttcactgatgtctctggaatggaaggaggaggaagtgagcatagcgttggtgcgttgctgtcaagggcgaattcacatggttaaccgacaaagcagcattagtccgttgatcggtggaagaccactcgtcagtgttgagttgaatgtttgatcaataaaatacggcaatgctgtaagggttgttttttatgccattgataatacactgtactgttcagttgttgaactctatttcttagccatgccaagtgcttttcttattttgaataacattacagcaaaaagttgaaagacaaaaaaaaaaacccccgaacagagtgctttgggtcccaagcttctttagactgtgttcggcgttccccctaaatttctccccctatatctcactcacttgtcacatcagcgttctctttccccctatatctccacgctctacagcagttccacctatatcaaacctctataccccaccacaacaatattatatactttcatcttcaactaactcatgtaccttccaatttttttctactaataattatttacgtgcacagaaacttagcaaggagagagagagcgggaatgcggccgccaccgcggtggagctcgaattccggtccgggcctagaaggccagcttcaagtttgtacaaaaaagcaggctccggccagaatggcccggaccgggttaccgaattcgagctcggtaccatcggaagttgaagacaaagaaggtcttaaatcctggctagcaacactgaactatgccagaaaccacatcaaagcatatcggcaagcttcttggcccattatatccaaagacctcagagaaaggtgagcgaaggctcaattcagaagattggaagctgatcaataggatcaagacaatggtgagaacgcttccaaatctcactattccaccagaagatgcatacattatcattgaaacagatgcatgtgcaactggatggggagcagtatgcaagtggaagaaaaacaaggcagacccaagaaatacagagcaaatctgtaggtatgccagtggaaaatttgataagccaaaaggaacctgtgatgcagaaatctatggggttatgaatggcttagaaaagatgagattgttctacttggacaaaagagagatcacagtcagaactgacagtagtgcaatcgaaaggttctacaacaagagtgctgaacacaagccttctgagatcagatggatcaggttcatggactacatcactggtgcaggaccagagatagtcattgaacacataaaagggaagaggaatggtttagctgacatcttgtccaggctcaaagccaaattagctcagaatgaaccaacggaagagatgatcctgcttacacaagccataagggaagtaattccttatccagatcatccatacactgagcaactcagagaatggggaaacaaaattctcgatccattccccacattcaagaaggacatgttcgaaagaacagagcaagcttttatgctaacagaggaaccagttctactctgtgcatgcaggaagcctgcaattcagttagtgtccagaacatctgccaacccaggaaggaaattcttcaagtgcgcaatgaacaaatgccattgctggtactgggcagatctcattgaagaacacattcaagacagaattgatgaatttctcaagaatcttgaagttctgaagaccggtggcgtgcaaacaatggaggaggaacttatgaaggaagtcaccaagctgaagatagaagaggaggagttcgaggaataccaggccacaccaagggctatgtcgccagtagccgcagaagatgtgctagatctccaagacgtaagcaatgacgattgaggaggcattgacgtcagggatgaccgcagcggagagtactgggcccattcagtggatgctccactgagttgtattattgtgtgcttttcggacaagtgtgctgtccactttcttttggcacctgtgccactttattccttgtctgccacgatgcctttgcttagcttgtaagcaaggatcgcagtgcgtgtgtgacaccaccccccttccgacgctctgcctatataaggcaccgtctgtaagctcttacgatcatcggtagttcaccaaggatcggtagttcaccacatgagtatttgagtcaagtttggcttgaataataagaattacacctttccgcaggatccatggccactgtgaacaactggctcgctttctccctctccccgcaggagctgccgccctcccagacgacggactccacactcatctcggccgccaccgccgaccatgtctccggcgatgtctgcttcaacatcccccaagattggagcatgaggggatcagagctttcggcgctcgtcgcggagccgaagctggaggacttcctcggcggcatctccttctccgagcagcatcacaaggccaactgcaacatgatacccagcactagcagcacagtttgctacgcgagctcaggtgctagcaccggctaccatcaccagctgtaccaccagcccaccagctcagcgctccacttcgcggactccgtaatggtggcttcctcggccggtgtccacgacggcggtgccatgctcagcgcggccgccgctaacggtgtcgctggcgctgccagtgccaacggcggcggcatcgggctgtccatgattaagaactggctgcggagccaaccggcgcccatgcagccgagggtggcggcggctgagggcgcgcaggggctctctttgtccatgaacatggcggggacgacccaaggcgctgctggcatgccacttctcgctggagagcgcgcacgggcgcccgagagtgtatcgacgtcagcacagggtggagccgtcgtcgtcacggcgccgaaggaggatagcggtggcagcggtgttgccggcgctctagtagccgtgagcacggacacgggtggcagcggcggcgcgtcggctgacaacacggcaaggaagacggtggacacgttcgggcagcgcacgtcgatttaccgtggcgtgacaaggcatagatggactgggagatatgaggcacatctttgggataacagttgcagaagggaagggcaaactcgtaagggtcgtcaagtctatttaggtggctatgataaagaggagaaagctgctagggcttatgatcttgctgctctgaagtactggggtgccacaacaacaacaaattttccagtgagtaactacgaaaaggagctcgaggacatgaagcacatgacaaggcaggagtttgtagcgtctctgagaaggaagagcagtggtttctccagaggtgcatccatttacaggggagtgactaggcatcaccaacatggaagatggcaagcacggattggacgagttgcagggaacaaggatctttacttgggcaccttcagcacccaggaggaggcagcggaggcgtacgacatcgcggcgatcaagttccgcggcctcaacgccgtcaccaacttcgacatgagccgctacgacgtgaagagcatcctggacagcagcgccctccccatcggcagcgccgccaagcgcctcaaggaggccgaggccgcagcgtccgcgcagcaccaccacgccggcgtggtgagctacgacgtcggccgcatcgcctcgcagctcggcgacggcggagccctggcggcggcgtacggcgcgcactaccacggcgccgcctggccgaccatcgcgttccagccgggcgccgccagcacaggcctgtaccacccgtacgcgcagcagccaatgcgcggcggcgggtggtgcaagcaggagcaggaccacgcggtgatcgcggccgcgcacagcctgcaggacctccaccacctgaacctgggcgcggccggcgcgcacgactttttctcggcagggcagcaggccgccgccgctgcgatgcacggcctgggtagcatcgacagtgcgtcgctcgagcacagcaccggctccaactccgtcgtctacaacggcggggtcggcgacagcaacggcgccagcgccgtcggcggcagtggcggtggctacatgatgccgatgagcgctgccggagcaaccactacatcggcaatggtgagccacgagcaggtgcatgcacgggcctacgacgaagccaagcaggctgctcagatggggtacgagagctacctggtgaacgcggagaacaatggtggcggaaggatgtctgcatgggggactgtcgtgtctgcagccgcggcggcagcagcaagcagcaacgacaacatggccgccgacgtcgggcatggcggcgcgcagctcttcagtgtctggaacgacacttaagcgtacgtgccggcctggctctccgaaagggcgtattccagcacactggcggccgttactagacccaacctagacttgtccatcttctggattggccaacttaattaatgtatgaaataaaaggatgcacacatagtgacatgctaatcactataatgtgggcatcaaagttgtgtgttatgtgtaattactagttatctgaataaaagagaaagagatcatccatatttcttatcctaaatgaatgtcacgtgtctttataattctttgatgaaccagatgcatttcattaaccaaatccatatacatataaatattaatcatatataattaatatcaattgggttagcaaaacaaatctagtctaggtgtgttttgcgaatgcggcctccgggcacccagctttcttgtacaaagtggccgttaacggatcggccagaatggcccggaccgggttaccccgcggttcaaagccaatgactgttgttaggtccagtttctaaggacgaatcatccaatcactggttctttctgaacaaaacaaagagctatagagttacgttactgtagccgagacagagcctgcaatctggttatgccacatactaggttctttcttaaagttgactcactctatcctaagttctacttacaaggagctacaacaaattggtcataaccggagagcgttcaaggaggtaatatcccatcttactctgtagcaaggctacaaaaggagagctaaagaactaggctacaaaaagagagctaaagaactaactatctagcaagactacagagctatagtgtagagatttcataaccggtgagcgttcaaggatactttgaagagaagaggtaatatctcaactagcaagactacaaaaaaatggagatataaaactaactgtctaacaagactacagagctatagtagagatagatacgttcgacacttaagcatgagaattcgagctcggtaccctggttcacaaactcaatacaacacacagtggagtagggtattacgctccggcggcccgaaccactctaaatccttgtgtcctcgtgtgctcttccaccattaatgactgtaattgcagggacacgaagagttgtagcgcttttgccaacaagatccgctatatgctagtagagtggaacctgcacagcaacaagcatccaataatctgagaataagaattatgtgtggtgatggttctcatctctgcaactcgccattttcgcgagagaaccaaatccaagttggtgaagatcatgatttgggctcatgggctggcatagtagctattacctttgcaattgtggttcgaatctatccgatattctccttttcagggagagctaatgcttatgcttattgggtattttggtttgacactgcttcacgcccaaaaaaaggcaactatgtctgagttggatatggcccaaaaaaaggcagctatgtctgagttggatatggaagtcttctttcgtttagggtgaagtaagaccaagctcatgagcttattatcttaggtcggaacaaattagttgataggcatggcacatttatcaaattataatgattttaacagaaaagcaacacctctttttcagcagcaccagctttgcaagctgcaattgacactccaagcatagtatttgctccaaactcagcctgcatttcgcacaatatcatatctatttccatttggataaaatatattttccagaaatatgggaacagaatcaagatacagaaaaaagttgtggtagtagtggtaagtggaaacacaagtacagtgaaaagatagcattatttctgaacagtcaaattaaccgaaataagtagtatcacatactgcccctaaattgactacacccaatgtaaagaattgcttgagcatattgagccatcagttgtttgtttgtgtaacggatttgacaatgcagagttcaggagcaaaaaaccgcaaaggagagaaagagggaaaggatctcctagtatcccaccttgtggcgcgccctgtcaagtgcatgatggcctggtcgatctgcgtctgctgctgcggttccatcccaacgagtgcctccgacaccttgtcgttgatcacccgcaccgcgtaggcgacccccctggcgaggaacttccgcctctcggaggccccggccgcgtcggcggcggcgccctcgagcgcgcccacgctagccgtagatgctcggtgcacggccttgttggtgtgcaactcgacctcaacggccggtgcgctacgcccgtcaaggatctggcgcgcccgcaccctcgtgatcacggtgggcgcctcccgcctcatgtggccgacgatgaaaagcgccgggttaggggccttggcgcgcaccgccgtattcagggcctcctcgctcttgcgcgagagcaggtgcttccccaggtactcctgcactgacaaggctgccacagcggtggaatttgtcctcacgacttcgccacgtcgtcctcacctccctggcttcccacgactccgccgtatcgaggtgctcggtgggtcgtcttaatccgaagtccgaactaggaagacgagacagagaggtctgaggaatgggcctcgtttgatgttgagctgaattatttttccagcataagcccaggtcttggtccatgaacaaaattactagaaacccagcccagtactacgatctaaaagagggactgccactggatagctctctctagcattctccacgctccaatacagcggcgtcgtgtctatccgggtctatccgcgaacacgtgagaactctccagaaactgctttctcctccacttcatctctctcgctttccctctataaaaagaccccttctaggaattgagggagacagcaagcaccaagcagcgatccgaagctcaatcaattcactcaaacctcttccccaaatcttcgattagatcttcgttgacaagaagactagaaccgaacctgacatgtccaacctgctcacggttcaccagaaccttccggctcttccagtggacgcgacgtccgatgaagtcaggaagaacctcatggacatgttccgcgacaggcaagcgttcagcgagcacacctggaagatgctgctctccgtctgccgctcctgggctgcatggtgcaagctgaacaacaggaagtggttccccgctgagcccgaggacgtgagggattaccttctgtacctgcaagcgcgaggtttgtttctgcttctacctttgatatatatataataattatcattaattagtagtaatataatatttcaaatatttttttcaaaataaaagaatgtagtatatagcaattgcttttctgtagtttataagtgtgtatattttaatttataacttttctaatatatgaccaaaacatggtgatgcctaggtctggcagtgaagaccatccagcaacaccttggacaactgaacatgcttcacaggcgctccggcctcccgcgccccagcgactcgaacgccgtgagcctcgtcatgcgccgcatcaggaaggaaaacgtcgatgccggcgaaagggcaaagcaggccctcgcgttcgagaggaccgatttcgaccaggtccgcagcctgatggagaacagcgacaggtgccaggacattaggaacctggcgttcctcggaattgcatacaacacgctcctcaggatcgcggaaattgcccgcattcgcgtgaaggacattagccgcaccgacggcggcaggatgcttatccacattggcaggaccaagacgctcgtttccaccgcaggcgtcgaaaaggccctcagcctcggagtgaccaagctcgtcgaacgctggatctccgtgtccggcgtcgcggacgacccaaacaactacctcttctgccgcgtccgcaagaacggggtggctgcccctagcgccaccagccaactcagcacgagggccttggaaggtattttcgaggccacccaccgcctgatctacggcgcgaaggatgacagcggtcaacgctacctcgcatggtccgggcactccgcccgcgttggagctgctagggacatggcccgcgccggtgtttccatccccgaaatcatgcaggcgggtggatggacgaacgtgaacattgtcatgaactacattcgcaaccttgacagcgagacgggcgcaatggttcgcctcctggaagatggtgactgaggtacccaacctagacttgtccatcttctggattggccaacttaattaatgtatgaaataaaaggatgcacacatagtgacatgctaatcactataatgtgggcatcaaagttgtgtgttatgtgtaattactagttatctgaataaaagagaaagagatcatccatatttcttatcctaaatgaatgtcacgtgtctttataattctttgatgaaccagatgcatttcattaaccaaatccatatacatataaatattaatcatatataattaatatcaattgggttagcaaaacaaatctagtctaggtgtgttttgcgatccgatatcgaattggccacggtaccagctgctgctgttctagggttcacaagtctgcctatttgtcttccccaatggagctatggttgtctggtctggtccttggtcgtgtcccgtttcattgtgtactatttacctgtaatgtgtatccttaagtctggtttgatggtgtctgaaacgttttgctgtggtagagcagcatggaagaactataatgaataagtgatccctaatcattgtgtccaaattttgcttctgctatacccttttgtgctgtttcttatgttttgcttaaaaatttgatctgacaaacaaatttgtctaaattatgctcttgttctgactgtgtactgtacacatttgtattgctaccggtttggcacatagttttctctttgattgcagatcaaacccttctgattgcagattgcttggctatggctgatgtgctcactgttcttctttagcttgtatattgctgatggtggcttggctacggctgaaaaagttgctgctgcgccgacttggcaactgttgctccagtaatgctttgtcctctcttcctagccgccgacttggcacttggcagctgttgctcctgtaatgcgttgttatctcttatctcttgagatgtactatgattttgaggctgtttgacttgtgccagattgccagtgctgatgctatattatctcaggtttttatgctagtatatgttttactgtgtgctgcctgtgtcgagttacgtaatctattgaaccgctatgcgtgttgatgccctgttgttgcttgccagattgatgcccctgttgcttgcagcttgcaagctgtagtgaaatcctaaaattccaaaccaaatctattctgaacttttgaagatctgtgatgtccggaagaaaagattcaaacagataaacgggactctccagaatctataaaataaatgatcgacaaacgctttgctttggtaggcttcaagcttggtcacccggtccgggcctagaaggccagcttcggccgccccgggcaactttattatacaaagttgatagataaatcagatatctggttcctaaggacccggcggaccgattaaactgattcggtccgacgcgttacctaataacttcgtatagcatacattatacgaagttattagctaactaactagtaagcttaagccatgggtcgacggatccgttaactagcgtggcatttggcaccgccgcacactatgcgagctaggagtgctagtttacagatgaaactatgaaaccaagaaaacacaattgtccgtagctagcgcgtggcgtcgtgtcaagcttcacacagtatcttcgttcttcactataaatcgcgcctgttgttcgtgagacccaccaccgtggataacagtcccctaataataagcgatcaacagcactgctgatggctgaacaccgaggcgccgccgcgcgtaaccatccgccggagcagcccgtcgtgccggcgaacgacgccttccccgaccgcgcccagcagctctgcctcgacgccgggcgcgcgctcgcgatgtgcggcgtgctcgtcgccgtccctcccgcattttacgcgtcgacgtcgcggacgacaccgcacttgccttcgtcggcttcgtcctctggatcatcggtgcgtggctgtgcctcctggcgctcacgcccttggctccacgggcggtgagggcgggcggggccgccgccagcaccttgctgatcaggtgcctgtccctttcatgaactactagcgcccgcgcccgcggccgccgggcacaagagaacacatcgatgttcgctgcgtacgtcagcaataaggcactctttgtcagtagtcgagtgcatatgttgggtgtttgccctgggagatttcaagtgttgtggccattatcccgcaggataaaaaatcggcggcttttggattgatacggaaaataacgatgtttcatgctcgtgttgtgtgtgtgacatcttgtcagccaagtttttaaccgttgctactccccctctgtgggctcagtgtgtggaccggaatacgtcgtacataggccgtagcctaagcccaatatgccgtttttcaggttggcctgtgtgacgacaagcgggtctcaaaagcccatcacgcaactggcctgcaattattggaggagagcgcgtcgagttggttccagaggctgcgtggtggggccggactctgcgacgacctctcgttcgcgtccgatttggttgccgtgagccgtgacgtaacgcctccttccgttcctccctatataagttccacccccgggtccggtttccccaagccccagtgacccccgatcccgatcgcgaaatctccgcacccgccggcaagggaccgaagcaagcctctctcccgaccgtcgcatcaaggtacgcgtccgctcgatctgtcctcttccttctcgatttgacttgctgtggtgcccgatcacgggatcagaatcgcaccagtgtagatttcgcatgttctaagatgtgttagtttccaggctaatccagttctcttgacgcccgatccgatcgagctccgtgtttatttcagcctaatcgtagtattcccctaaaatttcctcattagggggttcgcaagattgttggtcgacaggttcacttatgctcgatcgcttacttttagtcgattcatgctgcgtactattgttgccccccgtggttttatcttttctcgtgtgaaatccagtagatatagtagatatcgtagcattaggttttaattcaatcgattgattattgtatcatcaaaattgagaagttcgaatcatgcctatcatgctgcctcaaccgaaatcctgtatattgaagtttcaattcaattgattgatcattcattagattcaaccaaaatctagaaggttagatgacgcatgtcatgctgcctgcgtagtttacctttgatctgtttatgattaccttatcagtaggatatttgtgattttgggaagtagcactaactgattcatgctgacatgatgttccctttcagattatactgttgagtcctatctaattgatgctttgtatgctatatgaatacgtcatggtaaattagcagttaattagcatattagcaattgggcgtacctcatcaggattgctcttgtagatgtgtgtggtgatgtttcttgttcaattcatgttctgctttaaaagtatgtgttctctgtttgttaattaagattcatggttataatgatttggacctaattaatcagggttgcccttttagatgcgtggttacttgttgagttcatttttttcctgctatagttgtatgcgtttgttcattcatggttagatttgatttgtttcttctctattccatgccttccatatacttcaattgtagcttaacatgagatttctgtatatgcaggtcgaccgccggggatccacacgacaccatggcccagtccaagcacggcctgaccaaggagatgaccatgaagtaccgcatggagggctgcgtggacggccacaagttcgtgatcaccggcgagggcatcggctaccccttcaagggcaagcaggccatcaacctgtgcgtggtggagggcggccccttgcccttcgccgaggacatcttgtccgccgccttcatgtacggcaaccgcgtgttcaccgagtacccccaggacatcgtcgactacttcaagaactcctgccccgccggctacacctgggaccgctccttcctgttcgaggacggcgccgtgtgcatctgcaacgccgacatcaccgtgagcgtggaggagaactgcatgtaccacgagtccaagttctacggcgtgaacttccccgccgacggccccgtgatgaagaagatgaccgacaactgggagccctcctgcgagaagatcatccccgtgcccaagcagggcatcttgaagggcgacgtgagcatgtacctgctgctgaaggacggtggccgcttgcgctgccagttcgacaccgtgtacaaggccaagtccgtgccccgcaagatgcccgactggcacttcatccagcacaagctgacccgcgaggaccgcagcgacgccaagaaccagaagtggcacctgaccgagcacgccatcgcctccggctccgccttgccctccggactcagatctcgatagagtcaacctagacttgtccatcttctggattggccaacttaattaatgtatgaaataaaaggatgcacacatagtgacatgctaatcactataatgtgggcatcaaagttgtgtgttatgtgtaattactagttatctgaataaaagagaaagagatcatccatatttcttatcctaaatgaatgtcacgtgtctttataattctttgatgaaccagatgcatttcattaaccaaatccatatacatataaatattaatcatatataattaatatcaattgggttagcaaaacaaatctagtctaggtgtgttttgcgaattgcggcgcccttactttaacgcctctaaccaacacccctttatctttataaggaacaataaacagaatttgccccactgttctaaatcacctaataatatccccagctaaaaacaataaaggtttcctagaattaagacaagcatgactgttcctccaggagggtttggaacattgttgcagtcttgcagatacgggcgaagggtgagaaacagagcggagggctggaggtgacctcggtagtcgacgccggagttgagcttgacaacgacggggcggcccctgatggacttgaggaagtccgatggcgtcttcaccgtcccgccggcgcccgaggcgggcctgtcgctgccgccgccgccgctgctcatcttgcgcgctgtgcccccggcggtgtccctgtgttgcggatcgcgggtgggccaggtggatgcgagggcgacccgtttggactccggccggagccgccggatccctggtcggtgtcagtgccgtttactctgggccccacgtgtcagtaccgtctgtagatgacaacaacccgtcgtccacagtcatgtccaaaatatcctttcttcttttttttcgattcggatatctatcttccttttttttttccaaaaatcttcttgacgcaccagcgcgcacgtttgtggtaaacgccgacacgtcggtcccacgtcgatagaccccacccaccagtgagtagcgtgtacgtattcgggggtgacggacgtgtcgccgtcgtcttgctagtcccattcccatctgagccacacatctctgaacaaaaaaaaggagggaggcctccacgcacatccccctccgtgccacccgccccaaaccctcgcgccgcctccgagacagccgccgcaaccatggccaccgccgccgccgcgtctaccgcgctcactggcgccactaccgctgcgcccaaggcgaggcgccgggcgcacctcctggccacccgccgcgccctcgccgcgcccatcaggtgctcagcggcgtcacccgccatgccgatggctcccccggccaccccgctccggccgtggggccccaccgagccccgcaagggtgctgacatcctcgtcgagtccctcgagcgctgcggcgtccgcgacgtcttcgcctaccccggcggcgcgtccatggagatccaccaggcactcacccgctcccccgtcatcgccaaccacctcttccgccacgagcaaggggaggcctttgccgcctccggctacgcgcgctcctcgggccgcgtcggcgtctgcatcgccacctccggccccggcgccaccaacctagtctccgcgctcgccgacgcgctgctcgattccgtccccatggtcgccatcacgggacaggtggcgcgacgcatgattggcaccgacgccttccaggagacgcccatcgtcgaggtcacccgctccatcaccaagcacaactacctggtcctcgacgtcgacgacatcccccgcgtcgtgcaggaggctttcttcctcgcctcctctggtcgaccagggccggtgcttgtcgacatccccaaggacatccagcagcagatggcggtgcctgtctgggacaagcccatgagtctgcctgggtacattgcgcgccttcccaagccccctgcgactgagttgcttgagcaggtgctgcgtcttgttggtgaatcgcggcgccctgttctttatgtgggcggtggctgcgcagcatctggtgaggagttgcgacgctttgtggagctgactggaatcccggtcacaactactcttatgggcctcggcaacttccccagcgacgacccactgtctctgcgcatgctaggtatgcatgggacggtgtatgcaaattatgcagtggataaggccgatctgttgcttgcacttggtgtgcggtttgatgatcgcgtgacagggaagattgaggcttttgcaagcagggctaagattgtgcacgttgatattgatccggctgagattggcaagaacaagcagccacatgtgtccatctgtgcagatgttaagcttgctttgcagggcatgaatgctcttcttgaaggaagcacatcaaagaagagctttgactttggctcatggaacgatgagttggatcagcagaagagggaattcccccttgggtataaaacatctaatgaggagatccagccacaatatgctattcaggttcttgatgagctgacgaaaggcgaggccatcatcggcacaggtgttgggcagcaccagatgtgggcggcacagtactacacttacaagcggccaaggcagtggttgtcttcagctggtcttggggctatgggatttggtttgccggctgctgctggtgcttctgtggcaaacccaggtgtcactgttgttgacatcgatggagatggtagctttctcatgaacgttcaggagctagctatgatccgaattgagaacctcccagtgaaggtctttgtgctaaacaaccagcacctggggatggtggtgcagttggaggacaggttctataaggccaacagagcgcacacatacttgggaaacccagagaatgaaagtgagatatatccagatttcgtgacgatcgccaaagggttcaacattccagcggtccgtgtgacaaagaagaacgaagtccgcgcagcgataaagaagatgctcgagactccagggccgtacctcttggatataatcgtcccacaccaggagcatgtgttgcctatgatccctagtggtggggctttcaaggatatgatcctggatggtgatggcaggactgtgtactgactagctagtcagttaacagatctgccagatcctcggtgtacaaataacccgtcttatcctatgagacgggccggcgtcagtgtgttctggaggaatttttatgtcagagcctttttctttgtgtgcttgatgtagatgccaagggaagcttattggctgttgaagcttgatgcaaaataaattatggaactctgttttttgtttatctaataataactagcaaatatgcttccattgcattgaaactaacagccttttgtgtttccaagttttattttgtgacaatgtcatctatttcaattagttgtggaatcggaaacttgcaggactaacttggaaactccaatccctcagcatcctggactttttcctggtgtaatccatgtagatattattttaatcatcattttagttctggaggtttttccatctccggttttgctcccctttcttcaaaaaaaaaaaaaaaatgccgtaggcgccgcaacgcccacctgttgttcaaactcatgggcacgagtggctcgaagattttatacaacaattgctgtagtttcaccgttgctggtgaagaagcatttttttaaaaaaatatagtggtattcattttaattagtttagttgtgcagcgagcaaaatttggacatgctctgctcggaatctgatcgacctagacacagattagcagcagtagctttgtcatctgttccaagagttgcgatctgatagaagaaaaaaaaaccttcccttcaatgtaaaaccgaaactaacaagaaagaagcacagtgccgtttaggcaagtatggagtacgtattaagcatgtagaaggccatgcatgaaccactaacaagaaagaagcgcagtgccattcaggcaagcataagcatgtagattggcatgcatgaacaactaacagtagatcgtctctggtctgattagaagttttttgggaagccaagaaatcatgtacaactggttccatctcaaattccgtggcaaaaagaggcctaagcaacatacctcgagtagatcacattcaagcttggtcacccggtccgtcaatattctgattccgatgacttcgtaggttcctagctcaagccgctcgtgtccaagcgtcacttacgattagctaatgattacggcatctaggaccgactagtggcgcgccgactagctagctaaggtaccgagctcgaattcattccgattaatcgtggcctcttgctcttcaggatgaagagctatgtttaaacgtgcaagcgctactagacaattcagtacattaaaaacgtccgcaatgtgttattaagttgtctaagcgtcaatttgtttacaccacaatatatcctgcca

SEQ ID NO: 286 - DNA, 23095 bp, Artificial Sequence
  PHP102481
gtttacccgccaatatatcctgtcaaacactgcggccgcacttgaccgcggatggagccggagctgtggtgaggccatcgacgggaggtgggggagaacacagtctcagtgttctttgtgagtccgcaaggtttttagcttttctgtattaattaaggttgctgttggctgtagaatacggtcgtggaagagctgtatcggtagctactacgtaagctattatatactggaagtctggagctcgtcgatctccggtcgtcttcctccatttctcctcgtcttgctttgactgctgctaccatttgcttctgttttctgatgaagcatgccatgtcggccaccagtgtttgtgtggtttttgcagggaatggctttcaagtgctgtgattgaatggccctcgtcgtcctcggctgagctcacatggacgcgtcatgtgagtgagatatatgatcatatgatgagtggggttcgggtgagtgcgtacttgaagtaggatcccgctttcactcattcattcattggcctttaaaccgggaaattttcgcgaggagatggagggaagcaagcagggtgacgagtgcagagtgccgcgagcgctttgtcaaaaggcaccgccgtaggcaaaaaaatcaatggccctgactgactcgatggtagtactactgtagagactagagagggttgctccccatatcttcgtgtgacttttactccagcattgcatttccgtcattgagacgttaattaatagcagctttcgggacagatgactgtggccatgtttcgtcacggccgcttcgtgccagctgggggtactatagtactgtgattttgttagtaaaaactttcattaggccaccattgacgaccgggccttcgcttttgctgcgctaattaaccatttcccggcgaccgaagggaacatgaacatgccccgacacatgagggcatgaggactagtgttctccctgtcgttcgttgacttgactagtgatagtttaaacgctcttcaactggaagagcggttactaccggttcactagctagctgctaatcgagctagttaccctatgaggtgacatgaagcgctcacggttactatgacggttagcttcacgactgttggtggcagtagcgtacgacttagctatagttccggacttacccttaagataacttcgtatagcatacattatacgaagttatgggcccacgcgtgaagagcggttaccagagctggtcacctttgtccaccaagatggaactgtcttcggccagaatggccatctggattcagcaggcctagaaggccatttatcgctatcaactttgtatagaaaagttgggccgaattcgagctcggtacggccagaatggcccggaccgaagcttgcggccgcacactgatagtttaaactgaaggcgggaaacgacaatctgatcatgagcggagaattaagggagtcacgttatgacccccgccgatgacgcgggacaagccgttttacgtttggaactgacagaaccgcaacgttgaaggagccactcagccgcgggtttctggagtttaatgagctaagcacatacgtcagaaaccattattgcgcgttcaaaagtcgcctaaggtcactatcagctagcaaatatttcttgtcaaaaatgctccactgacgttccataaattcccctcggtatccaattagagtctcatattcactctcccgggggatctcgactctagaggatcgctcaggaaggccgctgagatagaggcatggcggccaatgcgggcggcggtggagcgggaggaggcagcggcagcggcagcgtggctgcgccggcggtgtgccgccccagcggctcgcggtggacgccgacgccggagcagatcaggatgctgaaggagctctactacggctgcggcatccggtcgcccagctcggagcagatccagcgcatcaccgccatgctgcggcagcacggcaagatcgagggcaagaacgtcttctactggttccagaaccacaaggcccgcgagcgccagaagcgccgcctcaccagcctcgacgtcaacgtgcccgccgccggcgcggccgacgccaccaccagccaactcggcgtcctctcgctgtcgtcgccgccgccttcaggcgcggcgcctccctcgcccaccctcggcttctacgccgccggcaatggcggcggatcggctgtgctgctggacacgagttccgactggggcagcagcggcgctgccatggccaccgagacatgcttcctgcaggactacatgggcgtgacggacacgggcagctcgtcgcagtggccacgcttctcgtcgtcggacacgataatggcggcggccgcggcgcgggcggcgacgacgcgggcgcccgagacgctccctctcttcccgacctgcggcgacgacggcggcagcggtagcagcagctacttgccgttctggggtgccgcgtccacaactgccggcgccacttcttccgttgcgatccagcagcaacaccagctgcaggagcagtacagcttttacagcaacagcaacagcacccagctggccggcaccggcaaccaagacgtatcggcaacagcagcagcagccgccgccctggagctgagcctcagctcatggtgctccccttaccctgctgcagggagtatgtgagagcaacgcgagctgccactgctcttcactgatgtctctggaatggaaggaggaggaagtgagcatagcgttggtgcgttgctgtcaagggcgaattcacatggttaaccgacaaagcagcattagtccgttgatcggtggaagaccactcgtcagtgttgagttgaatgtttgatcaataaaatacggcaatgctgtaagggttgttttttatgccattgataatacactgtactgttcagttgttgaactctatttcttagccatgccaagtgcttttcttattttgaataacattacagcaaaaagttgaaagacaaaaaaaaaaacccccgaacagagtgctttgggtcccaagcttctttagactgtgttcggcgttccccctaaatttctccccctatatctcactcacttgtcacatcagcgttctctttccccctatatctccacgctctacagcagttccacctatatcaaacctctataccccaccacaacaatattatatactttcatcttcaactaactcatgtaccttccaatttttttctactaataattatttacgtgcacagaaacttagcaaggagagagagagcgggaatgcggccgccaccgcggtggagctcgaattccggtccgggcctagaaggccagcttcaagtttgtacaaaaaagcaggctccggccagaatctcactgactagctaaccgcgtgcgccgtggaatccgcctggatcgctgggggcgtttccaactgatcccccgcggccttccgtcgaatccgcctggatcggccgccacttggcaggccgcgaaggatctcagcccaggaaaagcccacggctccaaggcgcaaatgaaagaggagaagagaaaatcgtgagaaaactcactggaggagaaaaatggctatagtaaaattagtgaaatacccaatccggaaaaaacgtctagtgcttcgcctacttcctcaaacaaaagagacgcgcgaagggcagagcctcagccacccagcagtaatagcagccgtggtgcccgttgagattccccgcgccgttccgtcgaatcgatcagccgcgcgcccggcgcccctgcacatatattatacccaatgcccacacctcacaaccacttgctaacgcgcgcggcggtgacctaggctgcggtggactggtcatcgctccccgccgacgtgttcctagccaccaccggtctcgactactacatgagcctccgcgccgcgtgccgcccctgccgcgccgccaccgcggacccgcgcggtccggaccggcgcttccatccccgccggtggatcatgctcgaactgaatatccatgtttcaagagatattgttaagtccaaagctttcaaactgaatatccatgtttcatcgaaatagggtacaaaactttcgagtttgtggatgttcaacccaaaatccataacatacaacggttcagcctatttcttgagttgacagttcgcaattcctagtggcaatgaatacatgctagctactcccctttaactaatgaatacttggctcgaaacctctcgaccattgagcttaatgagtccagccgagtttgattttgaactggtcaacgaaacatttgagtcaagccgagcataattctgagttcgttaataaaacaactttaaccactcaagcaacgagctactcgtttaacaccatcccctcttctccccttggtccttggtccatccctctttttgacctaactcaatatccacccacattccttgacacacaagcaaaaccactcttgactcgcgtcctcctctcatatggcatatatgttaatttattaacgatcgagttaaacaaaccaattttgtagttaaattgagtcgagcccatgtcgcttttgaacatgatatactattaacgagtcgagctaactgttgtaactagtgtgttatcttaattggttctaccaattcgagccaagctaactactccctccgttacataaagattggcacggatatccggctctactcacacggacatgtggtcataatgcaaaagatgcaaatgaacaattctgaacaggagatttgatatcagaacctttggttatgtggcatgtgcctttaaccgtgtggagctaacaatttaacttaatccgtattataatctcacgcacactgtgcttgattcttcttgctttgcttcccttggtgcgggtgcacatctcagagcatacggacggtatagaaagaaggtgcagtgcgtcccagactaaccaaactttttttttggctatacaaaatgcacggttgtttgttgcacgcaacgacgattgttccttttgccaaagtaaataaataagcatctctcgtcgaagatcattatttttctaattctctacctcgtgaaagctggaagtggccacgtcaccggcaaaactaaccaacggtaatatctcccggaaaaatccaccgagccagcccttcgctagcgccaaagaagttcaccgcgcgcacggccaaaatccacgcaagaccagcgaaatctcgtggtctccactctctgctcgcccggcgcggcgagaagataatctcatggccaccgcacggccacatcagcgagccaccgcagcatccccgtgaggacattgaccccaccccatcgccctcggctcagactcaaacccatcaaaaatccgcgcgcgcccacggtgccagccactccgtggccagagcgcggccacctcggcaacccccatccgccttcccggcacctcacagcgcgcgcgccaatggcgactcggcttaagattccccgtggataaggactcgaacgtaagcgcttacgacgtaagcgcttacgtcgcgcgcgttcgggcctcctatttaaacgcctctcgctcccgctttactccacagcaacaaccgctccaacacttcagttctcactccacagctcagagtcagagctactagcagaattcttgtaaggttcccttccctcctcccctcacacccctgttcgtgttccttcggatcggatctcagtggtgatgttagacgtccgcggctgcctacgtagtggcattgccgcccgaaaggtttgtttaggtggggtagatccgaaacaggccggatctggaccatgtccgcggcggggcggcgggacttgatcgcgtagctgtcgtgtgcatttctccctaccagtggcggaatcggcgatgtggacctaagggctaaggcttatctgctgccttgaccatttcgtcgctgacaaaaacaaagtgacaatcatgccgttctctgtttgtttatctggatcgttattacgctgtgaatcctgcgatatgtggctaagtgatttttcttctttttctgggggcagtttagcctttgacccagtcctaggtgtggtcactaggactgtgtagcatgatgagtgaggttgcagcaggctgattgctagtggacgtttttttccccaatttgttaggttttcacgctccaggttgtgcaagtaattttgctagtgattgtgtgatccatcttcaacgttgaaccttgtttttccccctaaaacccccaacaggaaatcttgccccgacttctattgcaaaaattgtaacgcttagcaccctgattgactcaattcctgtcactaggcatgctcggtcaaaagcagatgatttaccacttagaaactgccctgcccctgctttccacatagcatttcgaactttttgactactattgacacccccctaacttgccgaactatttctctcttcagctactatttacctagttataattacataaatgtttgtgtgtatcttgtgcagccatggccactgtgaacaactggctcgctttctccctctccccgcaggagctgccgccctcccagacgacggactccacactcatctcggccgccaccgccgaccatgtctccggcgatgtctgcttcaacatcccccaagattggagcatgaggggatcagagctttcggcgctcgtcgcggagccgaagctggaggacttcctcggcggcatctccttctccgagcagcatcacaaggccaactgcaacatgatacccagcactagcagcacagtttgctacgcgagctcaggtgctagcaccggctaccatcaccagctgtaccaccagcccaccagctcagcgctccacttcgcggactccgtaatggtggcttcctcggccggtgtccacgacggcggtgccatgctcagcgcggccgccgctaacggtgtcgctggcgctgccagtgccaacggcggcggcatcgggctgtccatgattaagaactggctgcggagccaaccggcgcccatgcagccgagggtggcggcggctgagggcgcgcaggggctctctttgtccatgaacatggcggggacgacccaaggcgctgctggcatgccacttctcgctggagagcgcgcacgggcgcccgagagtgtatcgacgtcagcacagggtggagccgtcgtcgtcacggcgccgaaggaggatagcggtggcagcggtgttgccggcgctctagtagccgtgagcacggacacgggtggcagcggcggcgcgtcggctgacaacacggcaaggaagacggtggacacgttcgggcagcgcacgtcgatttaccgtggcgtgacaaggcatagatggactgggagatatgaggcacatctttgggataacagttgcagaagggaagggcaaactcgtaagggtcgtcaagtctatttaggtggctatgataaagaggagaaagctgctagggcttatgatcttgctgctctgaagtactggggtgccacaacaacaacaaattttccagtgagtaactacgaaaaggagctcgaggacatgaagcacatgacaaggcaggagtttgtagcgtctctgagaaggaagagcagtggtttctccagaggtgcatccatttacaggggagtgactaggcatcaccaacatggaagatggcaagcacggattggacgagttgcagggaacaaggatctttacttgggcaccttcagcacccaggaggaggcagcggaggcgtacgacatcgcggcgatcaagttccgcggcctcaacgccgtcaccaacttcgacatgagccgctacgacgtgaagagcatcctggacagcagcgccctccccatcggcagcgccgccaagcgcctcaaggaggccgaggccgcagcgtccgcgcagcaccaccacgccggcgtggtgagctacgacgtcggccgcatcgcctcgcagctcggcgacggcggagccctggcggcggcgtacggcgcgcactaccacggcgccgcctggccgaccatcgcgttccagccgggcgccgccagcacaggcctgtaccacccgtacgcgcagcagccaatgcgcggcggcgggtggtgcaagcaggagcaggaccacgcggtgatcgcggccgcgcacagcctgcaggacctccaccacctgaacctgggcgcggccggcgcgcacgactttttctcggcagggcagcaggccgccgccgctgcgatgcacggcctgggtagcatcgacagtgcgtcgctcgagcacagcaccggctccaactccgtcgtctacaacggcggggtcggcgacagcaacggcgccagcgccgtcggcggcagtggcggtggctacatgatgccgatgagcgctgccggagcaaccactacatcggcaatggtgagccacgagcaggtgcatgcacgggcctacgacgaagccaagcaggctgctcagatggggtacgagagctacctggtgaacgcggagaacaatggtggcggaaggatgtctgcatgggggactgtcgtgtctgcagccgcggcggcagcagcaagcagcaacgacaacatggccgccgacgtcgggcatggcggcgcgcagctcttcagtgtctggaacgacacttaagcgtacctagtggtacctgacatcttatagtctgcaacctctcgtgtctgaattcctatctttatcaagtgttattgcttccacgactataggacagctttcgtcgaaagcttttgctcatgtgatctcgaaggattcatctagtctgatttttcgtgacttgtatcggttttattggattcatccaacatatatcaataaaaaatgagttgtgtttcctttcttcctagttcagttaaaattatttccctcctgcgcttgtgctgtaattgtctgtgtacctgttgtttgtgactgtgttagttcccttggatatgatttcgtatttgatatgtacatggagatagcttagcttcattattggagtatgaagttagtatgacatagtcactctcctggaaaattgacactgcaaaccatatttttattctgaaccacaaatcctagtcagtccgctggcatatgccgtccgtttgctgaatccagaacgtgggtttggagatgtacggctgagatgcctctatgcgaaggggatttcgtggtgaaacgagatgggagtagagcaacgcccgtggaagatgcttcaaacttccacacttttgagcaacgatcggcagtagtaaggtagacgatttcaagatcaaagcatatgaagataaacaacatcaacaacaaaatttgttggggttctatagagagaaacagagctacatacatacactgttttgtatctaccatctgagatgatgaaaagatgaaaaactaaagaatgccccggcgccaacgccaggacacgccgcgcgcgcgtcacccgagccatctcttgacccagccggcgctgtatatttacacacgttgcagcatcgatcaccacctgttcgatcgcgtcgccgtcaccggcgcgccgcgacttattgaactagtctagggcgcggctaacaacctagcttagattgccttgtctaaacccttaggctaacgcgccactctagaaggccgatctcccccgaacgcgccagatccgatatcgatgggccctggccgaagcttggtcacccggtccgggcctagaaggccgatctcccgggcacccagctttcttgtacaaagtggccgttaacggatcggccagaatggcccggaccgggttaccccgcggttcaaagccaatgactgttgttaggtccagtttctaaggacgaatcatccaatcactggttctttctgaacaaaacaaagagctatagagttacgttactgtagccgagacagagcctgcaatctggttatgccacatactaggttctttcttaaagttgactcactctatcctaagttctacttacaaggagctacaacaaattggtcataaccggagagcgttcaaggaggtaatatcccatcttactctgtagcaaggctacaaaaggagagctaaagaactaggctacaaaaagagagctaaagaactaactatctagcaagactacagagctatagtgtagagatttcataaccggtgagcgttcaaggatactttgaagagaagaggtaatatctcaactagcaagactacaaaaaaatggagatataaaactaactgtctaacaagactacagagctatagtagagatagatacgttcgacacttaagcatgagaattcgagctcggtaccctggttcacaaactcaatacaacacacagtggagtagggtattacgctccggcggcccgaaccactctaaatccttgtgtcctcgtgtgctcttccaccattaatgactgtaattgcagggacacgaagagttgtagcgcttttgccaacaagatccgctatatgctagtagagtggaacctgcacagcaacaagcatccaataatctgagaataagaattatgtgtggtgatggttctcatctctgcaactcgccattttcgcgagagaaccaaatccaagttggtgaagatcatgatttgggctcatgggctggcatagtagctattacctttgcaattgtggttcgaatctatccgatattctccttttcagggagagctaatgcttatgcttattgggtattttggtttgacactgcttcacgcccaaaaaaaggcaactatgtctgagttggatatggcccaaaaaaaggcagctatgtctgagttggatatggaagtcttctttcgtttagggtgaagtaagaccaagctcatgagcttattatcttaggtcggaacaaattagttgataggcatggcacatttatcaaattataatgattttaacagaaaagcaacacctctttttcagcagcaccagctttgcaagctgcaattgacactccaagcatagtatttgctccaaactcagcctgcatttcgcacaatatcatatctatttccatttggataaaatatattttccagaaatatgggaacagaatcaagatacagaaaaaagttgtggtagtagtggtaagtggaaacacaagtacagtgaaaagatagcattatttctgaacagtcaaattaaccgaaataagtagtatcacatactgcccctaaattgactacacccaatgtaaagaattgcttgagcatattgagccatcagttgtttgtttgtgtaacggatttgacaatgcagagttcaggagcaaaaaaccgcaaaggagagaaagagggaaaggatctcctagtatcccaccttgtggcgcgccctgtcaagtgcatgatggcctggtcgatctgcgtctgctgctgcggttccatcccaacgagtgcctccgacaccttgtcgttgatcacccgcaccgcgtaggcgacccccctggcgaggaacttccgcctctcggaggccccggccgcgtcggcggcggcgccctcgagcgcgcccacgctagccgtagatgctcggtgcacggccttgttggtgtgcaactcgacctcaacggccggtgcgctacgcccgtcaaggatctggcgcgcccgcaccctcgtgatcacggtgggcgcctcccgcctcatgtggccgacgatgaaaagcgccgggttaggggccttggcgcgcaccgccgtattcagggcctcctcgctcttgcgcgagagcaggtgcttccccaggtactcctgcactgacaaggctgccacagcggtggaatttgtcctcacgacttcgccacgtcgtcctcacctccctggcttcccacgactccgccgtatcgaggtgctcggtgggtcgtcttaatccgaagtccgaactaggaagacgagacagagaggtctgaggaatgggcctcgtttgatgttgagctgaattatttttccagcataagcccaggtcttggtccatgaacaaaattactagaaacccagcccagtactacgatctaaaagagggactgccactggatagctctctctagcattctccacgctccaatacagcggcgtcgtgtctatccgggtctatccgcgaacacgtgagaactctccagaaactgctttctcctccacttcatctctctcgctttccctctataaaaagaccccttctaggaattgagggagacagcaagcaccaagcagcgatccgaagctcaatcaattcactcaaacctcttccccaaatcttcgattagatcttcgttgacaagaagactagaaccgaacctgacatgtccaacctgctcacggttcaccagaaccttccggctcttccagtggacgcgacgtccgatgaagtcaggaagaacctcatggacatgttccgcgacaggcaagcgttcagcgagcacacctggaagatgctgctctccgtctgccgctcctgggctgcatggtgcaagctgaacaacaggaagtggttccccgctgagcccgaggacgtgagggattaccttctgtacctgcaagcgcgaggtttgtttctgcttctacctttgatatatatataataattatcattaattagtagtaatataatatttcaaatatttttttcaaaataaaagaatgtagtatatagcaattgcttttctgtagtttataagtgtgtatattttaatttataacttttctaatatatgaccaaaacatggtgatgcctaggtctggcagtgaagaccatccagcaacaccttggacaactgaacatgcttcacaggcgctccggcctcccgcgccccagcgactcgaacgccgtgagcctcgtcatgcgccgcatcaggaaggaaaacgtcgatgccggcgaaagggcaaagcaggccctcgcgttcgagaggaccgatttcgaccaggtccgcagcctgatggagaacagcgacaggtgccaggacattaggaacctggcgttcctcggaattgcatacaacacgctcctcaggatcgcggaaattgcccgcattcgcgtgaaggacattagccgcaccgacggcggcaggatgcttatccacattggcaggaccaagacgctcgtttccaccgcaggcgtcgaaaaggccctcagcctcggagtgaccaagctcgtcgaacgctggatctccgtgtccggcgtcgcggacgacccaaacaactacctcttctgccgcgtccgcaagaacggggtggctgcccctagcgccaccagccaactcagcacgagggccttggaaggtattttcgaggccacccaccgcctgatctacggcgcgaaggatgacagcggtcaacgctacctcgcatggtccgggcactccgcccgcgttggagctgctagggacatggcccgcgccggtgtttccatccccgaaatcatgcaggcgggtggatggacgaacgtgaacattgtcatgaactacattcgcaaccttgacagcgagacgggcgcaatggttcgcctcctggaagatggtgactgaggtacccaacctagacttgtccatcttctggattggccaacttaattaatgtatgaaataaaaggatgcacacatagtgacatgctaatcactataatgtgggcatcaaagttgtgtgttatgtgtaattactagttatctgaataaaagagaaagagatcatccatatttcttatcctaaatgaatgtcacgtgtctttataattctttgatgaaccagatgcatttcattaaccaaatccatatacatataaatattaatcatatataattaatatcaattgggttagcaaaacaaatctagtctaggtgtgttttgcgatccgatatcgaattggccacggtaccagctgctgctgttctagggttcacaagtctgcctatttgtcttccccaatggagctatggttgtctggtctggtccttggtcgtgtcccgtttcattgtgtactatttacctgtaatgtgtatccttaagtctggtttgatggtgtctgaaacgttttgctgtggtagagcagcatggaagaactataatgaataagtgatccctaatcattgtgtccaaattttgcttctgctatacccttttgtgctgtttcttatgttttgcttaaaaatttgatctgacaaacaaatttgtctaaattatgctcttgttctgactgtgtactgtacacatttgtattgctaccggtttggcacatagttttctctttgattgcagatcaaacccttctgattgcagattgcttggctatggctgatgtgctcactgttcttctttagcttgtatattgctgatggtggcttggctacggctgaaaaagttgctgctgcgccgacttggcaactgttgctccagtaatgctttgtcctctcttcctagccgccgacttggcacttggcagctgttgctcctgtaatgcgttgttatctcttatctcttgagatgtactatgattttgaggctgtttgacttgtgccagattgccagtgctgatgctatattatctcaggtttttatgctagtatatgttttactgtgtgctgcctgtgtcgagttacgtaatctattgaaccgctatgcgtgttgatgccctgttgttgcttgccagattgatgcccctgttgcttgcagcttgcaagctgtagtgaaatcctaaaattccaaaccaaatctattctgaacttttgaagatctgtgatgtccggaagaaaagattcaaacagataaacgggactctccagaatctataaaataaatgatcgacaaacgctttgctttggtaggcttcaagcttggtcacccggtccgggcctagaaggccagcttcggccgccccgggcaactttattatacaaagttgatagataaatcagatatctggttcctaaggacccggcggaccgattaaactgattcggtccgacgcgttacctaataacttcgtatagcatacattatacgaagttattagctaactaactagtaagcgtacacctgagcggttaccgaattcctgcccttaaggccaattgttcaagattcattcaacaattgaaacatctcccatgattaaatcagtataaggttgctatggtcttgcttgacaaagtttttttttgagggaatttcaactaaatttttgagtgaaactatcaaatactgattttaaaaaatttttataaaaggaagcgcagagataaaaggccatctatgctacaaaagtacccaaaaatgtaatcctaaagtatgaattgcattttttttttgtttggacgaaaggaaaggagtattaccacaagaatgatatcatcttcatatttagatcttttttgggtaaagcttgagattctctaaatatagagaaatcagaagaaaaaaaaaccgtgttttggtggttttgatttctagcctccacaataactttgacggcgtcgacaagtctaacggacaccaagcagcgaaccaccagcgccgagccaagcgaagcagacggccgagacgttgacaccttcggcgcggcatctctcgagagttccgctccggcgctccacctccaccgctggcggtttcttattccgttccgttccgcctcctgctctgctcctctccacaccacacggcacgaaaccgttacggcaccggcagcacccagcacgggagaggggattcctttcccaccgttccttccctttccgccccgccgctataaatagccagccccatccccagcttttttccccaatctcatctcctctctcctgttgttcggagcacacgcacaatccgatcgatccccaaatccccttcgtctctcctcgcgagcctcgtggatcccagcttcaaggtacggcgatcgatcatcccccctccttctctctaccttcttttctctagactacatcggatggcgatccatggttagggcctgctagtttcccttcctgttttgtcgatggctgcgaggcacaatagatctgatggcgttatgacggctaacttgtcatgttgttgcgatttatagtccctttaggagatcagtttaatttctcggatggttcgagatcggtggtccatggttagtaccctaagatccgcgctgttagggttcgtagatggaggcgacctgttctgattgttaacttgtcagtacctgggaaatcctgggatggttctagctcgtccgcagatgagatcgatttcatgatcctctgtatcttgtttcgttgcctaggttccgtctaatctatccgtggtatgatgtagatgttttgatcgtgctaactacgtcttgtaaagttaattgtcaggtcataatttttagcatgcctttttttttgtttggttttgtctaattgggctgtcgttctagatcagagtagaagactgttccaaactacctgctggatttattgaacttggatctgtatgtgtgtcacatatcttcataaattcatgattaagatggattgaaatatcttttatctttttggtatggatagttctatatgttggtgtggctttgttagatgtatacatgcttagatacatgaagcaacgtgctgctactgtttagtaattgctgttcatttgtctaataaacagataaggatatgtatttatgttgctgttggttttgctggtactttgttggatacaaatgcttcaatacagaaaacagcatgctgctacgatttaccatttatctaatcttatcatatgtctaatctaataaacaaacatgcttttaaattatcttcatatgcttggatgatggcatacacagcggctatgtgtggttttttaaatacccagcatcatgggcatgcatgacactgctttaatatgctttttatttgcttgagactgtttcttttgtttatactgaccctttagttcggtgactcttctgcaggtcgactttaacttagcctaggatccatggcccagtccaagcacggcctgaccaaggagatgaccatgaagtaccgcatggagggctgcgtggacggccacaagttcgtgatcaccggcgagggcatcggctaccccttcaagggcaagcaggccatcaacctgtgcgtggtggagggcggccccttgcccttcgccgaggacatcttgtccgccgccttcatgtacggcaaccgcgtgttcaccgagtacccccaggacatcgtcgactacttcaagaactcctgccccgccggctacacctgggaccgctccttcctgttcgaggacggcgccgtgtgcatctgcaacgccgacatcaccgtgagcgtggaggagaactgcatgtaccacgagtccaagttctacggcgtgaacttccccgccgacggccccgtgatgaagaagatgaccgacaactgggagccctcctgcgagaagatcatccccgtgcccaagcagggcatcttgaagggcgacgtgagcatgtacctgctgctgaaggacggtggccgcttgcgctgccagttcgacaccgtgtacaaggccaagtccgtgccccgcaagatgcccgactggcacttcatccagcacaagctgacccgcgaggaccgcagcgacgccaagaaccagaagtggcacctgaccgagcacgccatcgcctccggctccgccttgccctccggactcagatctcgatagggtaccaatggccagttaacagatccagctgctgctgttctagggttcacaagtctgcctatttgtcttccccaatggagctatggttgtctggtctggtccttggtcgtgtcccgtttcattgtgtactatttacctgtaatgtgtatccttaagtctggtttgatggtgtctgaaacgttttgctgtggtagagcagcatggaagaactataatgaataagtgatccctaatcattgtgtccaaattttgcttctgctatacccttttgtgctgtttcttatgttttgcttaaaaatttgatctgacaaacaaatttgtctaaattatgctcttgttctgactgtgtactgtacacatttgtattgctaccggtttggcacatagttttctctttgattgcagatcaaacccttctgattgcagattgcttggctatggctgatgtgctcactgttcttctttagcttgtatattgctgatggtggcttggctacggctgaaaaagttgctgctgcgccgacttggcaactgttgctccagtaatgctttgtcctctcttcctagccgccgacttggcacttggcagctgttgctcctgtaatgcgttgttatctcttatctcttgagatgtactatgattttgaggctgtttgacttgtgccagattgccagtgctgatgctatattatctcaggtttttatgctagtatatgttttactgtgtgctgcctgtgtcgagttacgtaatctattgaaccgctatgcgtgttgatgccctgttgttgcttgccagattgatgcccctgttgcttgcagcttgcaagctgtagtgaaatcctaaaattcgaaaccaaatctattctgaacttttgaagatctgtgatgtccggaagaaaagattcaaacagataaacgggactctccagaatctataaaataaatgatcgacaaacgctttgctttggtaggcttcctagttagttagcggaccgaagcttcggtccgggcctgcggccgcagatatcagaacctgcgtctggacgcacaagtcatagcattatcggctaaaatttcttaatttctaaattagtcatatcggctaagaaagtggggagcactatcatttcgtagaacaagaacaaggtatcatatatatatatatatataatatttaaactttgttaagtggaatcaaagtgctagtattaatggagtttcatgtgcattaaattttatgtcacatcagcaattttgttgacttggcaaggtcatttagggtgtgtttggaagacaggggctattaggagtattaaacatagtctaattacaaaactaattgcacaaccgctaagctgaatcgcgagatggatctattaagcttaattagtccatgatttgacaatgtggtgctacaataaccatttgctaatgatggattacttaggtttaatagattcgtctcgtgatttagcctatgggttctgctattaattttgtaattagctcatatttagttcttataattagtatccgaacatccaatgtgacatgctaaagtttaaccctggtatccaaatgaagtcttatgagagtttcatcactccggtggtatatgtacttaggctccgttttcttccaccgacttatttttagcacccgtcacattgaatgtttagatactaattagaagtattaaacgtagactatttacaaaatccattacataagacgaatctaaacggcgagacgaatctattaaacctaattagtccatgatttgacaatgtgttgctacagtaaacatttgctaatgatggattaattaggcttaatagattcgtctcgccgtttagcctccacttatgtaatgggttttctaaacaatctacgtttaatactcctaattagtatctaaatattcaatgtgacacgtgctaaaaataagtcagtggaaggaagagaacgtccccttagttttccatcttattaattgtacgatgaaactgtgcagccagatgattgacaatcgcaatacttcaactagtgggccatgcacatcagcgacgtgtaacgtcgtgagttgctgttcccgtagagaaatatcaactggtgggccacgcacatcagcgtcgtgtaacgtggacggaggagccccgtgacggcgtcgacatcgaacggccaccaaccacggaaccacccgtccccacctctcggaagctccgctccacggcgtcgacatctaacggctaccagcaggcgtacgggttggagtggactccttgcctctttgcgctggcggcttccggaaattgcgtggcggagacgaggcgggctcgtctcacacggcacggaagacgtcacgggttccttccccacctctcctcttccccaccgccataaatagccgaccccctcgcctttctccccaatctcatctcgtctcgtgttgttcggagcacaccacccgccccaaatcgttcttcccgcaagcctcggcgatccttcacccgcttcaaggtacggcgatcgtcttcctcctctagatcggcgtgatctgcaagtagttgatttggtagatggttaggatctgtgcactgaagaaatcatgttagatccgcgatgtttctgttcgtagatggctgggaggtggaatttttgtgtagatctgatatgttctcctgtttatcttgtcacgctcctgcgatttgtggggattttaggtcgttgatctgggaatcgtggggttgcttctaggctgttcgtagatgaggtcgttctcacggtttactggatcattgcctagtagatcagctcgggctttcgtctttgtatatggtgcccatacttgcatctatgatctggttccgtggtgttacctaggtttctgcgcctgattcgtccgatcgattttgttagcatgtggtaaacgtttggtcatggtctgatttagattagagtcgaataggatgatctcgatctagctcttgggattaatatgcatgtgtcaccaatctgttccgtggttaagatgatgaatctatgcttagttaatgggtgtagatatatatgctgctgttcctcaatgatgccgtagcttttacctgagcagcatggatcgtcctgttacttaggtagatgcacatgcttatagatcaagatatgtactgctactgttggaattctttagtatacctgatgatcatccatgctcttgttacttgttttggtatacttggatgatggcatgctgctgctttttgttgatttgagcccatccatatctgcatatgtcacatgattaagatgattacgctgtttctgtatgatgccatagcttttatgtgagcaacatgcatcctcctggttatatgcattaatagatggaagatatctattgctacaatttgatgattattttgtacatacgatgatcaagcatgctcttcatactttgttgatatacttggataatgaaatgctgctgcacgttcattctatagcactaatgatgtgatgaacacgcacgacctgtttgtggcatctgtttgaatgtgttgttgctgttcactagagactgttttattaacctactgctagatacttacccttctgtctgtttattcttttgcagccagaatagcggatccgcccatggtcgaacaggacggcctgcatgcaggatcaccagcggcctgggtcgaaagactcttcggctacgactgggcacaacagaccatcgggtgtagcgacgcagctgttttcaggctgtccgcacagggcagacccgttttgttcgtcaaaacagacctgtctggcgcgctcaacgaactgcaagacgaggccgcaagactgagctggcttgctaccacaggcgttccttgtgctgcagtcctcgacgtcgttactgaggctggaagagactggctgctcctgggtgaagtcccaggacaggaccttttgtccagccatctggcacctgccgaaaaggtcagcatcatggcagacgccatgagaaggctgcacacactcgaccctgcaacatgccccttcgatcaccaggcaaaacacaggatcgagcgcgcaagaacgcgcatggaggctggtttggtcgaccaagatgacctcgacgaggaacaccaaggactggctcctgctgaactcttcgccagactcaaggcgagaatgccagacggtgacgacctggtcgtcacacacggcgacgcttgtctcccaaacataatggtcgagaacggacgcttcagcggtttcatcgactgcggtagactcggagtcgctgacagataccaggacatcgccctggcaacacgcgacatcgcagaggaactcggaggcgaatgggctgacaggtttctcgtgctctacggtatcgctgctccagacagccagaggatcgcattctacaggctcctcgacgagttcttttagttcgaacggtacccggggatcctctagtgccgtgggtcgtttaagctgccgctgtacctgtgtcgtctggtgccttctggtgtacctgggaggttgtcgtctatcaagtatctgtggttggtgtcatgagtcagtgagtcccaatactgttcgtgtcctgtgtgcattatacccaaaactgttatgggcaaatcatgaataagcttgatgttcgaacttaaaagtctctgctcaatatggtattatggttgtttttgttcgtctcctaatatttgcctgggatcaaattttattggctggtgttcatttgacctccatgttcttgctaggctccattttttactctacagccataatatgtttgattgtttggtttgttctttgttgtacacctggttctgtcgagcttagttttcgacactggcttacagcttaacatgttgctattttattgggttctgattgctattttattgggttctgattgctagtttttgctgaatccaaaaaccatgttatttatttaagcgatccaggttattattatgatggtggctaagtttttttttttccaagggtaaattttctggattctccagtgtttctgtggccgaattcaatcactagagtcgacctgcatgattccgatgacttcgtaggttcctagctcaagccgctcgtgtccaagcgtcacttacgattagctaatgattacggcatctaggaccgactagctagctagctaagagctcggtaccgagctcgaattcattccgattaatcgtggcctcttgctcttcaggatgaagagctatgtttaaacgtgcaagcgctactagacaattcagtacattaaaaacgtccgcaatgtgttattaagttgtctaagcgtcaatttgtttacaccacaatatatcctgcca

SEQ ID NO: 287 - DNA, 1563 bp, Brachypodium distachyon
ggcgtcaggactggcgaagtctggactctgcagggccgaactgctgaagacgaagcagaggaagagaaagggaagtgttcgacttgtaatttgtaggggttttttttagaggaacttgtaatttgtaggtgggctggcctcgttggaaaaacgatgctggctggttgggctgggccgatgtacgcttgcaaacaacttgtggcggcccgttctggacgagcaggagtttcttttttgttctcacttttctggtcttctttagttacggagtaccttttgttttttaaaggagttaccttttttttaggaattctttagttacctttcgcttgctctcaaaaaatatttaactttcgctttttttcattttaatttttgcaactatttacgagtttcatgaatgcttattttccagcatatcattatttgcaagtatttttatgccgtatgtattggacgagagccatcgggactgttccagagactgcgtggtggggacggctcccaaccgccttttctatctctgttcgcatccggtggccgacttggctcgcgcgtgagccgtgacgtaacagacttggtctcttccccatctggccatctataaattcccccatcgatcgaccctccctttccccaatccagcacccccgatcccgatcgaaaattctccgcaacagcaagcgatcgatctagcgaatccccgtcaaggtatgtagcctctcgattcctcctcagccctgccctcgatttggtgtacgcgttgagatgatgatctcgtagatgtctagatgacaccttgtcgatttgaaatagatcagatccgtgtagatcgatgagctcctgtgtacctgtggattcaagttattttcgcatgctattgttgtgatctactagatctagtgtgtgtattctatgctatcgatttctccgtgtagatttcactcgattactgttactgtggcttgatcggccatagatgttggttaaggtttgatcggttagtgtttgaacctgcgtggatatctagcatccatctattatcgtgtaggtatcgaacaaacaagcactattattgtactgatggttcgtctatggttggttttgaccgttttagtgttgaacgagccttctgtatttgtttattgctgtccagtgatgtaccatgttcgttgagtgtcggattatactaattattgttgattgataatcttgtagtttgcttttcctaatttatttatcgtagtcctgatttgcctcagctgtgcctcacccgtgcgatggtcaatcaacttgttagcccaatctgcttaatcatgtacatttgttgttagaatcagagatcaagccaattagctatcttattgcttatctgttccatgttctgatcgatgtaacagtctacacttttgctctgtgctacttgattaaaacattctgacttaaattcatgattggaagtttcagatctgattgttgccttacttgactaatatctattcatgtgacacctctctgtcttggtaacttaccgctgtttgtttgtaatttctgactatgcag

SEQ ID NO: 288 - DNA, 2077 bp, Brachypodium distachyon
ctgctcgttcagcccacagtaacacgccgtgcgacatgcagatgccctccaccacgccgaccaaccccaagtccgccgcgctcgtccacggcgccatccgcatccgcgcgtcaacgtcatccggaggaggcgagcgcgatctcgacggccacggcggcggcggacacgacggcgacgccccgactccgcgcgcgcgtcaaggctgcagtggcgtcgtggtggccgtccgcctgcacgagatccccgcgtggacgagcgccgcctccacccagcccctatatcgagaaatcaacggtgggctcgagctcctcagcaacctccccacccccccttccgaccacgctcccttcccccgtgcccctcttctccgtaaacccgagccgccgagaacaacaccaacgaaagggcgaagagaatcgccatagagaggagatgggcggaggcggatagtttcagccattcacggagaaatggggaggagagaacacgacatcatacggacgcgaccctctagctggctggctgtcctaaagaatcgaacggaatcgctgcgccaggagaaaacgaacggtcctgaagcatgtgcgcccggttcttccaaaacacttatctttaagattgaagtagtatatatgactgaaatttttacaaggtttttccccataaaacaggtgagcttatctcatccttttgtttaggatgtacgtattatatatgactgaatattttttattttcattgaatgaagattttcgaccccccaaaaataaaaaacggagggagtacctttgtgccgtgtatatggactagagccatcgggacgtttccggagactgcgtggtgggggcgatggacgcacaacgaccgcattttcggttgccgactcgccgttcgcatctggtaggcacgactcgtcgggttcggctcttgcgtgagccgtgacgtaacagacccgttctcttcccccgtctggccatccataaatcccccctccatcggcttccctttcctcaatccagcaccctgattccgatcgaaaagtccccgcaagagcaagcgaccgatctcgtgaatctccgtcaaggtatgcagcctcgcttcctcctcgctaccgtttcaattctggagtaggtcgtagaggataccatgttgatttgacagagggagtagattagatacttgtagatcgaagtgcggatgttccatggtagatgataccatgttgatttcgattagatcggattaaatctttgtagatcgaagtgcgcatgttccatgaattgcctgttaccagtagattcaagtttttctgtgttatagaggtgggatctactcgttgagatgattagctcctagaggacaccatgccgttttggaaaatagatcagaaccgtgtagatcgatgtgagcatgtgttcctgtagatccaagttctttcgcatgttactagttgtgatctattgtttgtgtaatacgctctcgatctatccgtgtagatttcactcgattactgttactgtggcttgatcgttcatagttgttcgttaggtttgatcgaacagtgtctgaacctaattggatatgtattcttgatctatcaacgtgtaggtttcagtcatgtatttatgtactccctccgtcccaaattaactgacgtggattttgtataagaatctatacaaatccatgtcagttaattcgggatggagtaccatattcaataatttgtttattgctgtccacttatgtaccatatgtttgttgttcctcatgtggattctactaattatcattgattggtgatcttctattttgctagtttcctagctcaatctggttattcatgtagatgtgttgttgaaatcggagaccatgcttgttattagatagtttattgcttatcagtttcatgttctggttgatgcaacacatattcatgttcgctatctggttgctgcttgatattctctgatttacattcattataagaatatattctgctctggttgttgcttctcatgactttacctactcggtaggtgacttaccttttggtttacaattgtcaactatgcag

SEQ ID NO: 289 - DNA, 1054 bp, Banana streak virus
gataaaaaggagttgatcataagaacagacagccaggccattgtagccttctacaagaagcaagcggatcacaagccttcaagaacgagatggcttatgttgattgattacattactgggctcggaatcaacgttaaatttgagcacattgacggaaaagaaaatgtcctagctgacactttatcaagattggtccaagttctaatcacaagggttcatcatccagcagagactcagctagttgaagccgtcatggaagtcctgagcaatccgaaaaaggaagccttggataaggtaaatcattttatctttctaacccaacaatggattgcagaacaaagaaaggagcatatggtgaacacactgctccagttggaagaacctcaactacactgcggctgcaaagatcacacaacaggagaaagaaggaacgccgttcttctccaaagtcacacctcagccaacccgtatagatggttctataagtgtgcacaagacagatgtcacacttggatttggaaggacatcctggaccagtatgctgaagattatgccgcttacaccaggattggacttgaggcacttagccttgaagactggttcgaagaaccagaacccgatccacctgacccagtggaccgccagaagatagaagatatcctggacctgcaagatgtcagcaatgacgattgaaagattcccaggatagccggcggacgtggtggacccagtctaggtgcgatgcttagtcacgcacgatgactctgtcggaaggcatctttactttcggcaaactttaataatactttaggaaaagtattgtacaagttaggtgcagaatcaataatgcacccagctttagtcttgtctactgaattattgtgtcggttgcattattggatgcctgcgtgcaccctaagcaatccccggctctcatctctataagaggagcctttgtattcagttgcaagcatgcaagtcacacactgcaagcttacttctgagcaaaaagagttttgagtgaaataaatttgaagttcccccttacatcttg

SEQ ID NO: 290 - DNA, 320 bp, Agrobacterium tumefaciens
acactgatagtttaaactgaaggcgggaaacgacaatctgatcatgagcggagaattaagggagtcacgttatgacccccgccgatgacgcgggacaagccgttttacgtttggaactgacagaaccgcaacgattgaaggagccactcagccgcgggtttctggagtttaatgagctaagcacatacgtcagaaaccattattgcgcgttcaaaagtcgcctaaggtcactatcagctagcaaatatttcttgtcaaaaatgctccactgacgttccataaattcccctcggtatccaattagagtctcatattcactc

SEQ ID NO: 291 - DNA, 1095 bp, Zea mays
aggcgacccatcgctgctttgtctacatcatgttcttcatcatcctccccaggcgacgcgtgctgctgttcttattcagactaccgttcgagtgactgcatggcgtacatctttctgcatcgactttgtacggctacatcgaacatatacacgagatgtctcgtgtgaatagagtcactaatgccttaagcatcggttactccgtagggtacattctgttcttcttatttgtgcatatttttattgttgtttactgattatacgagtagttatacatacatgcacatacatatcatcacatatatcacaatatttttctaaattaaattaaaactaaaaatgactaaatttctaacaccaacgacattgtaatgttttctccaacaactttacctattctacattgttctatttcgaatttcactctataaacaacatagtctacaatggaaaacagtgctttgtacgactatatacgcgatgtgtggctacaacataagacaatatagtcgtttgaagattgaacctatatatcggtacggttaatccgtctatgtacgtgggcatgacgaacacccgtgataacgaaggattaacgtgcacaatcataaatccaaagtaggagcggtgcatgatgagaatcgctctcagtactcgacataatgaaccttacgaggtacaacaggcaggcaggcagggaccaggggccgcctttatttcaggctcgctggccccacgggcgtgctgcgtgcacgaagggcactaccccaacctctcaccgaaaaccgcgctggatcggcaaatcaaacgaggtggtgccccgtgcccactctccacgtccacggcaccatccctctgcagccgctcaccagccatgccgtgtcgcggaacggcacaaccacccccaacccactcacgaaaccccgtcccggccgtgcccgtgtcggtccgcgctcggcaacgaggcggcccgcgctgctgagtcccctggacacccgacaccctgtcggccctttgtttattcatcccgaaatctcatctgcccccacggccgactgcgctgcgccgcccggatatatatacccatcgttatcg

SEQ ID NO: 292 - DNA, 971 bp, Zea mays
ccctagctccctgcggctgttacgcggtcccccatcaatcttctgttcttgcggttgtagcctgtgtaacagtgctagagtatgtatgataaataggttttaagtctgcttacatgacattttttattgtggaagagacatataaaaattagagagagtggttctcatgcaacggcggacggcccggtgctaaaagagcttcaagacaaaataatgaaacaggaagagagtagatttatctaagagccaactttattatatgaatgtgtttattgttggctttagatgatatggtaaggagttagagctaataatagataggctctattattattattattaattaaactcgctctaaggaggaaagtgggaggaagggacgaggacgaagactactggaagcatcgtgcatggatgatggatgtggtgtctcttaatgtaggtggccggaggatgtacgtgttaattgcgcgataagcactcagatccaaccgcaaactacctccacactgacacactgatagagagaaagagagacctccgacgactgccgccgcagatgagccacgtacgtatacgacgtctgccggccggctcaggctgccgccatcaccctgctcgaaagtcgcgttaggcggcgccagctacataggagtatctagtctagccagttagtatactactactgcgctgatgatgaattaactctgcatagatactgtacttgcctccctccaacacccaaccacctcctgctcggctcttaataacttggacacggatcgatgccatccaaggaagaacacgacgacgacgacggaacatccaccatgcaagcttgcatccatacgccgatacgcgtgcatccatccatccaccattatttccattttccaccgatcacacgtacacaggcctatttaaggagcgacatcccactgcaactctcctcaccactcatcaccagctag

SEQ ID NO: 293 - DNA, 436 bp, Cauliflower Mosaic Virus
catggagtcaaagattcaaatagaggacctaacagaactcgccgtaaagactggcgaacagttcatacagagtctcttacgactcaatgacaagaagaaaatcttcgtcaacatggtggagcacgacacgcttgtctactccaaaaatatcaaagatacagtctcagaagaccaaagggcaattgagacttttcaacaaagggtaatatccggaaacctcctcggattccattgcccagctatctgtcactttattgtgaagatagtggaaaaggaaggtggctcctacaaatgccatcattgcgataaaggaaaggccatcgttgaagatgcctctgccgacagtggtcccaaagatggacccccacccacgaggagcatcgtggaaaaagaagacgttccaaccacgtcttcaaagcaagtggattgatgtgat

SEQ ID NO: 294 - DNA, 467 bp, Zea mays
ccggctttaattcgtaacgagcagtttataccgttttgcgctgcattcaccttcgtgagtccggaccccggaagacaggaactgtagcctttttccctttgctagcatgaatatgaatagaataacacgaatttaacatcaattcagctcatattggaacaatctacgcctaaaatttagtggaacacgttttgctcattttccttgaaaagcaacagtgaagcaacatcggtaaaggttcttttggttgcctctaacggtctaacctgaggattcagttataatctggaacatgacagaaacagagcctcgcacccgttttgggaccaaaaccacatgatcgatctccaagaagattattttggacaatatttttccagccacaggcaatccgaagaccacaaatcagaggcactccaaatgcagcccatccattggaccatacagataagacccggataaggcag

SEQ ID NO: 295 - DNA, 770 bp, Sugarcane bacilliform virus
aagcttattgaatggggaaaacaaattcttgatccattccccaaattcaagaaggatatgtttgaaagaactgaacatatcatgatggcaacacaagagcctacgctactatgtggatgcaggaagcctgcaatcatgttaacatcaggaacaaggcttaatcctcgtagaagattttacaagtgtgccatgaatatctgccactgctggtattgggcagatttacttgaagaatacgtgcaagagaggatcgaagatttcatggttgaaaacttcgacaagaaagcaaagctggatgaaccaagttcatcaaacgttcaccatgatgattatgaagaacaccgttcgagtgtcatcgacaggccaaggccaacagatgatcatttcagaccatggggggatgttacatactggctgaataaagaagcagaagagtgccacacaaggggcgacaacgtcgaaggcgcagaagacgcagtcgatctcactgacgtaagcaatgacgaccagtggaggagatcgtaagcaatgacgtatggagcgtggaggacccatgaaagcactgagaaggcatctcaactttcggtgtgtgagtgcgcatcctatgcgatgctttgtacctttgttagctgtgtgtgtccttttggcatctgtgccactttacctttgtcggccacgttgcctttgcttagcatctacgcaagcatagcgctcggctggtgtgtgttccctctgcctatataaggcatggttgtatgactcttacactc

SEQ ID NO: 296 - DNA, 88 bp, Artificial Sequence
  8xDR5 PRO
ccttttgtctcccttttgtctcccttttgtctcccttttgtctcccttttgtctcccttttgtctcccttttgtctcccttttgtctc

SEQ ID NO: 297 - DNA, 41 bp, Flaveria trinervia
gtgaatttatgagagctgtacttactcactaaaacaaacaa

SEQ ID NO: 298 - DNA, 2164 bp, Zea mays
ttcgttaccaactgggttgcataggatttcatgattaagagtgtgtttggtttagctgtgagttttctcctatgaaaaaactgttgtgagaaaaaatagttggaagtcgtttagttcaaactgttgtgagttatccactgtaaacaaattgtatattgtttatatacactctgtttaaatatatctcttaatcagtatatataattaaaaaactaatttcacatttgtgttcctaatattttttacaaataaatcattgtttaattccatttgtaataagtttttattaaaattgcttttatttcatttattataaacatttaattgttttaatcctattttagttttaatttattgtatctatttattaatataacgaacttcgataagaaacaaaagcaaggtcaaggtgttttttcaaagtagttgtggaaaagctgaaccccttttattcaacttttagaagcaggaaaacagaaccaaacagaccctaaaaatgtgtgaatttttagcaggttaattattcgcatctctttggtcatgtttaagaggctggaatagatcaactgcaagaacacatagcagagtggatagggggggggggggggagggtcgtcgtctccctatctgacctctcttctgcattggattgcctttttcggtactctatttaaaacttaaaagtacaaatgaggtgccggattgatggagtgatatataagtttgatgtgtttttcacataagtgacaagtattattgaaagagaacatttgcattgctactgtttgcatatgggaaaattgagaattgtatcatgccatggccgatcagttctttacttagctcgatgtaatgcacaatgttgatagtatgtcgaggatctagcgatgtaatggtgttaggacacgtggttagctactaatataaatgtaaggtcattcgatggtttttctattttcaattacctagcattatctcatttctaattgtgataacaaatgcattagaccataattctgtaaatatgtacatttaagcacacagtctatattttaaaattcttctttttgtgtggatatcccaacccaaatccacctctctcttcaatccgtgcatgttcaccgctgccaagtgccaacaacacatcgcatcgtgcatatctttgttggcttgtgcacggtcggcgccaatggaggagacacctgtacggtgcccttggtagaacaacatccttatccctatatgtatggtgcccttcgtagaatgacaccccttatccctacaatagccatgtatgcataccaagaattaaatatactttttcttgaaccacaataatttattatagcggcacttcttgttcaggttgaacacttatttggaacaataaaatgccgagttcctaaccacaggttcacttttttttttccttatcctcctaggaaactaaattttaaaatcataaatttaatttaaatgttaatggaaacaaaaaattatctacaaagacgactcttagccacagccgcctcactgcaccctcaaccacatcctgcaaacagacaccctcgccacatccctccagattcttcactccgatgcagcctacttgctaacagacgccctctccacatcctgcaaagcattcctccaaattcttgcgatcccccgaatccagcattaactgctaagggacgccctctccacatcctgctacccaattagccaacggaataacacaagaaggcaggtgagcagtgacaaagcacgtcaacagcaccgagccaagccaaaaaggagcaaggaggagcaagcccaagccgcagccgcagctctccaggtccccttgcgattgccgccagcagtagcagacacccctctccacatcccctccggccgctaacagcagcaagccaagccaaaaaggagcctcagccgcagccggttccgttgcggttaccgccgatcacatgcccaaggccgcgcctttccgaacgccgagggccgcccgttcccgtgcacagccacacacacacccgcccgccaacgactccccatccctatttgaacccacccgcgcactgcattgatcaccaatcgcatcgcagcagcacgagcagcacgccgtgccgctccaaccatctcgcttccgtgcttagcttcc

SEQ ID NO: 299 - DNA, 2041 bp, Zea mays
ctaactaactaggcagcctagtatcagcaaaggatttaagtgaatctcacttcgcacaaaactgtcaattcaaggcttagtccattgttcagttgtgaatgggtgaaacttttattctagatggatgttcaacttaacagtctccatcgaaacactggtatatcaaaggattgtgattatgatacttcatcattacaaaccctagaatttggtgggggttgttggatcttttatgggcttggcccatttattgaataaactctatgctgtgtaatggtggagaataccaatagtaccatattggaagtccaagggtcttttggcttgacttatatggtgggaattattccacctaacttgagaagtcaagaaacggaaaagggcgtgccaccggccgggccgggctcgggccggccgtggcgtggcaggcgagcgggcgtggtgtggttgtgttaatttttagcactcactaaccgtggttgtgttaatttttagcactcactaaccgcgtaaacctttcagttgcctgtctcttcgtcagcagcatgcgagacccttgtccttcagctgcccgtctcttggcgtgccgcatgcgacccttctccttcagcttccctttgagagaggttaagtagaggagaacccttggcacttggtacacgagaaacagaactatttcagagtcacagcccagccgcaagtgagagtattcccatctcgtgactctacgcgcacagagcagcgagagggcaggtgcctccgaagcccttgccgttcgagaccttgcacgggggatcggcaattaggtttttggggagcgtctacgcgactgcccaaaacatcttctttctggctacatgacaagggaagctggacaaagatctggatcatcagagcgcatgagagggtatgatcagtttatttttttactgttttacgttctacagattagatatgtttcatatattcatctgtgctgttttatatgtagcaatgattttagcttatctgttctgtcttattataatatgttatatctgtctgttttaattttacagtcatgttgtttatgtttctatctgtttattttgaattgttcagtcagtttatatgcttatcattatatgatttatatgattcatatgctgtgtgttctcatgatccatattgttatggatatatttgagatcacacttttatatgttatcattataatgttaatttatataattaaaatgatatgaaaaatgcctatatatctaacgttcaaattaattgataggcaattatccctagactgctagtatatagtcttctagttaactaattcatgcttgatgcgtacgtgcttatgaagtatcggctatttgtcaagatcattggccataggacagtagtggtccaaaagatctagatctccgttgggagcagggtcacaacgtagggaaaggaaaggtggacaatacgtgaaacctcatcctttcacaggaaaggcgcctcatcgggatgcaaggtcgctttcacacatgcatacatgatatttgaggggatcggcagtgcatattttagaattgaagggcatgcatgatattttacaatctttaatcttttaattcgaaaataaatgacaaatatttaagaacgaagttagtattaggcagaagcttgcatcgcatctttctcgcaggtggtgggatttgctcaggaggcatgataggtacttggacggttcccaattttaggcggcggagcggaatacttttagaaatcagagaacttgaatttctccacaaagccatccttggccatcgtccatcgatcaaaatatctgcatacaccagctagctgacacagggtgggtgccagagtgcccgtgaccaaccacgccccatctgctaaacacgtagccatgcatggcgccacggccacgccagccaagatatttgttgccctcgtctcgtcttgtgcccttcttaatataaaccttgtgcccctctgctgcagcaagaaggaaagaagctagcgcttatagcttgtcagc

SEQ ID NO: 300 - DNA, 972 bp, Zea mays
gagctccctttaatctggcgctagatctgcatccgcggcttgcaaagataaatggcacatttagtgtgttattttgcaatacctttcatagtagatatccttaaatgcagttttaggcatgtttgggtaattaaataacatttttaggaggagttttagatttacctttctttcgtgatgactgatgacagacgtggggaattcaaatgcaactctagcgaaagttcatatatttttcataaatagctgaggctggggtaattattttttgtagaaaaatagaataggtggaatggtttggggaaggcgtaggcgctcgtggacgacgccccataaaagacaagaggcggaattgccatgaattcgaggtagctaagtaaggcgcatatatatgccaaaaattctactgtcactttccaatttcaatgcgctgccaaacaagccgccgacccatggatactgacttgaattcagcccaattctgtagatccaaacagggccggcgtcagtgcctcaggtgagagagcagcagacgatgcaaagagccaaaagtggaagcagacgcagccgaagccgaagcccaagcccaaaactgttttgtctttgcccagaaccgcgacgagcctaaactgccgcttcctcctatctacaagtccctggcacatcacgcatagtccaaccatggcgcgcaggcgataaggcgcgccacggggacgcgacatgtggtggcggacgcgatcaggatagggccaggctggccgggcgcggccacgggagaacggtggccactcgtcccacatccgcttcgtcctgtcctgtactgcgtcctgcccccaacgagagccggagccggccatcccgtcgcacactctccccctctatatatgccgtcggtgtgggggagcctactacaggacgacccaagcaagcaagcaagcagcgagtacatacatactaggcagccaggcagtc

SEQ ID NO: 301 - DNA, 443 bp, Cassava vein mosaic virus
ccagaaggtaattatccaagatgtagcatcaagaatccaatgtttacgggaaaaactatggaagtattatgtgagctcagcaagaagcagatcaatatgcggcacatatgcaacctatgttcaaaaatgaagaatgtacagatacaagatcctatactgccagaatacgaagaagaatacgtagaaattgaaaaagaagaaccaggcgaagaaaagaatcttgaagacgtaagcactgacgacaacaatgaaaagaagaagataaggtcggtgattgtgaaagagacatagaggacacatgtaaggtggaaaatgtaagggcggaaagtaaccttatcacaaaggaatcttatcccccactacttatccttttatatttttccgtgtcatttttgcccttgagttttcctatataaggaaccaagttcggcatttgtgaaaac

SEQ ID NO: 302 - DNA, 1951 bp, Flaveria trinervia
aagcttatgtttgttggtagtttttctttttgcattgtatatgatatctagaacatgaaaaaaggactcaccaggacaggagtattgcatctatgtttttattcgaatatttctcgttacacaatagaaaaacaaaacaaatccacggaaaggataatgagcttatacgtggacaatattgagactatatttctatggttgaaatcatgtgaatttatgagagctgtacttactcactaaaacaaacaaaaaactaaaacaaacaaaaaactgaaacaaacaaaatcctccataaaaagatgaatcgaacattttctttttgtcatgatacatatatatatatatatatatatatatatatgtatatgtatatatatatatatatgtatatatatatatacacacacacacacacatatatatatatatatatatatatgtatgtatgtatatatgtatatatatatgtgtgtgtgtgtgtgaatatgttgcatatatattgagaaatggaaattaagtacaataatattctctacatagaggcgttaatgcgtcaattttgtgtgttaaagacataatctaatacaacattgaagattttctatgaatttggaaagtatgtatacacaaaaattatgtaagagataaaagacttgtgtggaaatcaaatacctataaaataattgcaattgttacgaaagatgatttgtttatttatgtattaactttttacataaaatacctactaagtttgatttttaaaataaaattactcttaaattttagcagaataaccaggtaaactcataaacacatggtactgactttacactcacccattagctaagtgtgtttgtgatacaaccctatttcgtattatgtataaaactcacaaatctagttgtatgcattaggtgtgagatagccccagaaagttttatgagagggttgtatgtccaaaaactttatgatcatataggttttgtttttttgtttttttgtttttttgtttttttgtttttttttgttttttttgtttttttgttttgtttttttttgttttgttttttttgttttttttgttttttttgtttttttgtttttgtttttgcgtgtgcgtgtatgagagctagtgagggtaccaccgataaaaatgccactgaaatcgatattgaatataacgacctttgcaagaagagaattaagtatttatgagtacatacttttgaaggctttctcgtatttaatctttcgcaggtttaaaaatattaattatatattacaccccaatgcttttaaatctttacaacttaatccttataatttttcattttcaactttgatcccatatacttttttatattttataaaatttttatcttacttttcagtctaaattttacgagttaacaagcggcaacgtgcgcgtgtggcttcaatgtttctacgcatatttttccatttgacggccccgtcacaacgcacaagtcatagatagacctagctattattttttttaataatattttacgtttgtcatgggtgattcaacgtttttatgcataattttcatgttgatttatttatttttgttgtactttataatgcgagtatttccggtgttaatgatggatgatgttaaatgacatcgttttaatactaattgttttttaatttacaaaactctcaacaaatgattagttgggttagttattcataggaaagcggacgagcatgtcgttataattaaaaaaatatcaaaagagtaaacaaaaaaggaaaaagactaattatttagataataataatatccacaaaaatattcgaattcttcaatcctgagtttgctctgtggatgagtttctgtatcattgatacttgatacctgtaattcacacacctcatatctcatacttcatctataaatacccaattcattttgctcaaagtc

SEQ ID NO: 303 - DNA, 860 bp, Zea mays
ctggtaattattggctgtaggattataaacagagcctaaatagctggaatagctctagccctcaatccaaactaatgatatctatacttatgcaactctaaatttttattctaaaagtaatatttcatttttgtcaacgagattctctactctattccacaatcttttgaagcaatatttaccttaaatctgtactctataccaataatcatatattctattatttatttttatctctctcctaaggagcatccccctatgtctgcatggcccccgcctcgggtcccaatctcttgctctgctagtagcacagaagaaaacactagaaatgacttgcttgacttagagtatcagataaacatcatgtttacttaactttaatttgtatcggtttctactatttttataatatttttgtctctatagatactacgtgcaacagtataatcaacctagtttaatccagagcgaaggattttttactaagtacgtgactccatatgcacagcgttccttttatggttcctcactgggcacagcataaacgaaccctgtccaatgttttcagcgcgaacaaacagaaattccatcagcgaacaaacaacatacatgcgagatgaaaataaataataaaaaaagctccgtctcgataggccggcacgaatcgagagcctccatagccagttttttccatcggaacggcggttcgcgcacctaattatatgcaccacacgcctataaagccaaccaacccgtcggaggggcgcaagccagacagaagacagcccgtcagcccctctcgtttttcatccgccttcgcctccaaccgcgtgcgctccacgcctcctccaggaaagcga

SEQ ID NO: 304 - DNA, 1542 bp, Zea mays
acgcttacgcttatgaatcagcttgattcgtaattggttctaacgagccttaatgcatggatgttggagagaaccaatatttatggaggaaataaagcatttaaatcagatttttttccatacatgttttccttatgaaatagatcgatgatttacactaaagttcatacccatttacgatgttttgcttaacgttttatgctgaaatccgcctgagctcacacgcacgatcggttccatatcttttgttccgatatatacggtaacttctagcttcatgggcgagctaatcacggtggtgtatggacccacctgaacgaaccaatgaaaaatttgttgccgctctcatgttatgcaagtctgaaccattaaatatgctagcataaacacgagtaggaaccaactacccgaccagcgaacacgacgttggcccaccttcgtccatcccaactcgaccccaccacgtgcgcaccttctgtttacgtaaaacataacatatgtttacacatgtataaacgtgccccacaatcgcgcggacgcacgtgccccactgacccgacctgaccacgcgtgtgaccactaccctggctaggacttcccatgcctatcggaagccctgagcttccattatcaacgcctatatatattattcaattgaagcaaaacatagtggttttttgtaagctgtataaaaatatttcattgttaaatcctgaggtataccaaaaaaaaggtgtttaaccaatggtttgaacaactttttttcatctttaaattacatttccaaaaatgatatttatttaatttattattattagattccactgaggagcaaaaacacatattcaagttaagaatgctgtattgagtcccccgttgtcggaaattaaaattatacttcatgtgatttataatttgctgtagtgcggcgcgcggctcttacgactgagctgaggccaaaataaagcagcaggttcgttgggggcgataatcccaggcggtgcactacaatttgaagtgtactaccctggcactctaaaagcatacacgcatgcaaaagcagctcccgctttttttgaatggagaagattatctcaatcgacaaatatatacgcgtaggacaatttatacactttagttatatatacatggccagaaaattgtcatctctaaagcaactacactgaaaaagaactttgcattttcacagtcccacaaaaaaaaaacaaaaaaaagttaaagagacatgtgcttgaagagcccctgcgcacttgtacacggtgacacaacatgcatgtacaccaaggcctgcctgcgcgccacctcgtcgtgctcgtgcctatataaagccactcgcatcccagcctatcattgcaagagtttgagacagcagaggacactcctcctcagaactctcccttccctcttgtaggggccaaaagggtcagagaactaggaagaagagaactagtccccaagcctaacaagaaagcaagatcttctgcaactgttggcattcgccttaatttgtatccatatccc

SEQ ID NO: 305 - DNA, 2015 bp, Zea mays
ctaactaactagctagagtctacgtgtaagccaaacactctttaaacccgctttaccaatatattggagttgtttaatgataaaggtggaaaaccgaagctacaatttctgaagtgaatccttccaaacatggccttaattaaattgtttgggagtacggttttttttacgatttctagacaatgtcatgttttttagtaatattatagtattttatgttataaaaggtttcgttcaattcctaaaaactatgtttttaaaatcaagatattatagataccatgatatttttacagtattgaaaattttgctctactctaaagtcttcatgacatgactaacctttgccgaatactatggcctacaattttacatataaataattacagagaacaatattgtaaaaccgtatttttgagaaatattggtgccaaacagagccttgagttgagaagctgatacattcggttcggccctgcaattccagacagatggttctggttgcagctcaaattctttggctggaagaagggcgcacgtcgctgtctctgatgagcaggctttagttggatcaaggtcgctgttgctcggtttatatggtccagtctaaatccgtctactgcttctatgcccaaaaaaagatcgatccactctctcgtaggatttgtttttgggaaggaaaaaaaaacaattcatatgccttgagtggaaaaaaatcgaaatggaaatgaaaggcttgctaattatcaaaggacattagctaagctctgcacatcactctaagtctttacccctactagtactacctaaggtattaaaaaaggagaataaaaaccaaaagcaaaaaaagaagaagaagaaaacttgtggccagggttgctttggcagcgtaacgttaacgacggccacaagttggggtggggtgggtggtgtgggccccgccgcaggatctttctgggcctcgaagctggccgcgtgacgtggcgccgaaaaagcgcagcgagaaatacttgtggccacgctttttgcggccacggatattcttcttttctttccctgcacaagcacagcacagcacggtgcacttcctatattattttacttttctgttacaaaaaaagagaggaaatgctcttggaatttcttgtggacacgacacagctaggaatttatccttctttcttgttcgtttcctttttcttatctagtaacgagaaaaccgtccgggtttatccgcggaaaaaatatctgctatttgaacggccgcagatatttgcggtgttttctcttttattttctctacgctgcttcgtgccctattgtcaacacgtggaaaccttcctatccactccaatcacttcactccacttctcaaattttcagaacaaacttctaaatttataatgaggctcaatgaaatatttaatttcgatacaatgctatagataaacaaaaccaccctgagaaattggggaaaaaaaagagaaagagaccctctatctcaaaagggaaaacagaggggtcagaacgtaaaatatccgcagagggcggaggtgggccctcccctcccggggcctccccagccactcgatccctggcccttctcgaaatttccagccctgacaggcggggcccacggccgacgtggcccgcctcccctcccctcccttcgcccccagaaatctcgccgctcccacccctctccttcctctcgccatttccatttccttgcccttgccagccagagcgagactccaccgcttcctctccgccgcgtcctcctcccctccctccgttcctcacggctctccggactcgccccgcggctggccgtgctgagtttcgttctctggccggcaaagaagcgatttttttgtgctttctggacggatcccggccggagaagggaccgaatttccacgacctcgaccgccggctgctcctctgctgggctctccgtgcgcaagaagagcctaccaaggtgaatccggagatttcagctccgggcccgcccc

SEQ ID NO: 306 - DNA, 1739 bp, Zea mays
aacaaaaattttgtgtatttgtcgtataaggattgcttccctttaaggtcatgttcctgcactgtaaagcaggcaaaggaaaaaaaagttatgaaggttaaaatgcatcatgggagcatcacctcattttgcacaaataacaaagaagctaaattttgctcccgaacaaacaacagcaatgctacggaatgcaactacctagcatttccaaaaatacagggccttccggtactgtattacaacttacaagcgatgaggccaagacgattagacgaatagctacagaacaagacaatgagagttcagcactcactttttgccagttccttctccttggcagcagccaggcgcttgagtttagcagcttgtgcaaatgtggacggcctacagcagacatacaggcaaagaagcgaggagtaatttgcagttggaaatcattcttcgatcaatagggaaactctgagtcacagcgaaaggaaggttaattgcctacgttgacaactgatcagcctccttgagaagttgcttgatttcaagccgcactttgatctgctcatcactaagtcctccgctctggatgacaaaagcacagaacgcatgagtggcaagtggaaacactagagcgaaataaatacaaaaccgcagactacaggctaacagatagggagaccgggaagacaaagactcgagcctgcattcaacagttacagtcgcctcggccaaaggttgagaaatttgcatcaaaatccaaactgtctagggccttgggaaatagttcctcggaatcagagttcaattcatggacgaaatagatggaactgatggtaggctactcttccgcccaatcacaattcacggaagatccaggtctcgagactaggagacggatgggaggcgcaacgcgcgatggggaggggggcggcgctgacctttctggcgaggtcgaggtagcggtagagcagctgcagcgcggacacgatgaggaagacgaagatagccgccagggacatggtcgccggcggcggcggagcgaggctgagccggtctctccggcctccgatcggcgttaagttggggatcgtaacgtgacgtgtctcctctccacagatcgacacaaccggcctactcgggtgcacgacgccgcgacaagggtgagatgtccgtgcacgcagcccgtttggagtcctcgttgcccacgaaccgaccccttacagaacaaggcctagcccaaaactattctgagttgagcttttgagcctagcccacctaagccgagcgtcatgaactgatgaacccactaccactagtcaaggcaaaccacaaccacaaatggatgaattgatctagaacaatccgaaggaggggaggccacgtcacactcacaccaaccgaaatatctgccagtatcagatcaaccggccaataggacgccagcgagcccaacacctagcgacgccgcaaaattcaccgcgaggggcaccgggcacggcaaaaacaaaagcccggcgcggtgagaatatctggcgactggcggagacctggtggccagcgcgcggccacatcagccaccccatccgcccacctcacctccggcgagccaatggcaactcgtcttaagattccacgagataaggacccgatcgccggcgacgctatttagccaggtgcgccccccacggtacactccaccagcggcatctatagcaaccggtccaacactttcacgctcagcttcagcc

SEQ ID NO: 307 - DNA, 92 bp, Zea mays
agatcaagtgcaaaggtccgccttgtttctcctctgtctcttgatctgactaatcttggtttatgattcgttgagtaattttggggaaagct

SEQ ID NO: 308 - DNA, 837 bp, Zea mays
atggactccagcagcttcctccctgccgccggcgcggagaatggctcggcggcgggcggcgccaacaatggcggcgctgctcagcagcatgcggcgccggcgatccgcgagcaggaccggctgatgccgatcgcgaacgtgatccgcatcatgcggcgcgtgctgccggcgcacgccaagattagcgacgacgccaaggagacgatccaggagtgcgtgtcggagtacatcagcttcatcacgggggaggccaacgagcggtgccagcgggagcagcgcaagaccatcaccgccgaggacgtgctgtgggccatgagccgcctcggcttcgacgactacgtcgagccgctcggcgcctacctccaccgctaccgcgagttcgagggcgacgcgcgcggcgtcgggctcgtccctggggccgccccatcgcgcggcggcgaccaccacccgcactccatgtcgccagcggcgatgctcaagtcccgcgggccagtctccggagccgccatgctaccgcaccaccaccaccaccacgacatgcagatgcacgccgccatgtacgggggaacggccgtgcccccgccggccgggcctcctcaccacggcgggttcctcatgccacacccacagggtagtagccactacctgccttacgcgtacgagcccacgtacggcggtgagcacgcgatggctgcatactatggaggcgccgcgtacgcgcccggcaacggcgggagcggcgacggcagtggcagtggcggcggtggcgggagcgcgtcgcacacaccgcagggcagcggcggcttggagcacccgcacccgttcgcgtacaagtag

SEQ ID NO: 309 - protein, 278 aa, Zea mays
MDSSSFLPAAGAENGSAAGGANNGGAAQQHAAPAIREQDRLMPIANVIRIMRRVLPAHAKISDDAKETIQECVSEYISFITGEANERCQREQRKTITAEDVLWAMSRLGFDDYVEPLGAYLHRYREFEGDARGVGLVPGAAPSRGGDHHPHSMSPAAMLKSRGPVSGAAMLPHHHHHHDMQMHAAMYGGTAVPPPAGPPHHGGFLMPHPQGSSHYLPYAYEPTYGGEHAMAAYYGGAAYAPGNGGSGDGSGSGGGGGSASHTPQGSGGLEHPHPFAYK

SEQ ID NO: 310 - DNA, 1117 bp, Zea mays
aacaccaaggagaggattcgatgacgagtttgaggacgccattgctaggatgattaaccctaggctctggttccatgtagaaatcagaggcgcgatggaaataggtggaacgtcggtctccgctccagagatcacgacggcttcgtgtttgatatttctggtggcacaaaaacaaggcgcgagttacatatatatagatgagtatcgccagctttagttctattctaggaaaggataagttttacatggttacaattgatctatttctattaactgcctatagaacttagccggcaatatctcaaccatatttggaatacaacacatatatgttaacaatcagtctagcagctaggttgctgtgtggattcgtgaagcggcaaattcttggatggctgcaggtgcccgacatctttcgagcctccttgcaaattgctagtttttttcttgtttttcctctttgacttggtccgagtgtgctatgcagttgctgtgagagtgcaccttctgcttagtcgcatgatacaaggaactgttgattctaaaaaaaactttattttaatgtaaaggagagagaatttaatatcagttttttttcgatatagactttcatgtgattttgcatcgcccgatacatcagtgtgtttgtttggctttagtccatagcggcttctataacgttttgcctcgatagattacagctagctgcagcagttttaaaagccgtctttaatcggaagccaacatctcgacatatagagcgttcgataggatgcttacttattctagtctattaaatttcccaccgctgctaattaatgctaatgaattaactctctctgcctatccctcgacatgcactaatgtaggagtatatcccaacgcccaaccacctcctaataacttcgacggatggcagctaccgtccttggaagatggtgacggaatgtccagcattccaccgactgccagaaactgcacgcacatctgtcatcagcaatcgctagcctatttaatgagcaacattccattgcaatctcctcaggccacttacctgcagtcaccactcccaagccagtacccacagtcctacgagcagtcgcacgcaagtgtcaag

SEQ ID NO: 311 - DNA, 795 bp, Wheat Dwarf Virus
atggcctcttcatctgcacccaggttccgtgtctattccaagtacctctttctaacatatcctgaatgtacccttgagccacagtacgccttggattcacttcgcactctcttgaacaaatatgagcccctctacatcgctgctgttagagagctccacgaagatggatcaccacatctgcacgttctcgtgcagaacaagcttcgtgcttccatcaccaatcccaatgccttaaacctccgtatggatacatctccattctccatattccatccaaatatacaagctgccaaagactgcaaccaagttcgtgattacatcacgaaggaggttgactccgatgtaaacacagctgagtggggaacattcgtggctgtttcaactccaggtcgtaaagaccgtgatgcggatatgaaacagatcattgaatctagttcctctcgcgaggaattcctcagcatggtttgcaatcgttttccgtttgaatggtctatccgtctcaaagacttcgagtacacggcacgccatctatttcctgacccagttgccacttacacacctgagtttccaaccgaatcactcatttgccatgagaccattgaaagctggaaaaatgaacatctctactctctgtccctcgagagctacatcctgtgcaccagcacccctgccgaccaggcccagtccgacctcgaatggatggacgactacagccgtagtcaccggggaggcataagtccatctacatctgcgggccaaccagaacaggaaagacttcctgggcaaggtctctag

SEQ ID NO: 312 - protein, 264 aa, Wheat Dwarf Virus
MASSSAPRFRVYSKYLFLTYPECTLEPQYALDSLRTLLNKYEPLYIAAVRELHEDGSPHLHVLVQNKLRASITNPNALNLRMDTSPFSIFHPNIQAAKDCNQVRDYITKEVDSDVNTAEWGTFVAVSTPGRKDRDADMKQIIESSSSREEFLSMVCNRFPFEWSIRLKDFEYTARHLFPDPVATYTPEFPTESLICHETIESWKNEHLYSLSLESYILCTSTPADQAQSDLEWMDDYSRSHRGGISPSTSAGQPEQERLPGQGL

SEQ ID NO: 313 - DNA, 21 bp, Arabidopsis thaliana
tccacaaccaagcactcccat

SEQ ID NO: 314 - DNA, 1233 bp, Zea mays
atgaggtccatggagagcacggactcgtcgtccggtgagctaccaccaccgcagaagcagccgagctcggcgccggatctcccgccgggcttccggttccaccccacggacgaggagctggtcgtccactacctcaagaagaaggccgcgtccgtgccactccccgtcgccatcatcgcggaggtcgacctctacaagttcgatccgtgggagctacctgataaggcgacattcggcgagcaggagtggtacttcttcagcccgagggaccgcaagtaccccaacggagcgcggccgaacagggcggcgacgtccggctactggaaggcgactggcacagacaagcccatcatggcgtccggcggcaaccgcgagaaggtcggcgtcaagaaggctctcgtgttctaccgcgggaagccgccaaagggcctcaagaccaactggatcatgcacgagtaccgcctcgcggatgcggcgagctcaaccaccagccggccgccgccgccttgcaacgccggaggcaaggccacgtctctcaggctcgacgactgggtgttatgccgcatctacaagaagatcgacaaacttggagtcggcgatccgccgcggatcatggagtgcggcgaggactccgtggagaatgcggtggcagcctacccgacgcatgccgcggctgctgccatggccgtcgcagtcgcaggcggaggaggggcttaccataccggcaattacacttcgctgatccaccaccatcacgaggacagcttcctggtggatgggctgctcacagcagaggacgcgggcggcagctccctgagccagctagccgcggcagccagggcagctgctccaacagacaccaccaagcagctcctcgtcccgtcctccaccaccccgttcaactggctcgacgcgtcggcactcacgattcttccgccggcaaagaggttccatgggtacaacagagacaccactgacggcggcggcacgtccctcccgtcgccgtccgagaggaataacctgcaggcggctgtcggcgccgtcgatagtggcgccagcggtggcactagtgccgtcattccatcatttctcaatccgctcggcgtgcaaggtgcgacaagctatcaccaccacgccattttcggcacaccggtgacgccggaagccgccgcggccgccgcatgcagtttccagcacccctaccagctgtccggcgtgaactggaacccgtaa

SEQ ID NO: 315 - protein, 410 aa, Zea mays
MRSMESTDSSSGELPPPQKQPSSAPDLPPGFRFHPTDEELVVHYLKKKAASVPLPVAIIAEVDLYKFDPWELPDKATFGEQEWYFFSPRDRKYPNGARPNRAATSGYWKATGTDKPIMASGGNREKVGVKKALVFYRGKPPKGLKTNWIMHEYRLADAASSTTSRPPPPCNAGGKATSLRLDDWVLCRIYKKIDKLGVGDPPRIMECGEDSVENAVAAYPTHAAAAAMAVAVAGGGGAYHTGNYTSLIHHHHEDSFLVDGLLTAEDAGGSSLSQLAAAARAAAPTDTTKQLLVPSSTTPFNWLDASALTILPPAKRFHGYNRDTTDGGGTSLPSPSERNNLQAAVGAVDSGASGGTSAVIPSFLNPLGVQGATSYHHHAIFGTPVTPEAAAAAACSFQHPYQLSGVNWNP

SEQ ID NO: 316 - DNA, 771 bp, Artificial Sequence
  Maize-optimized RKD4
atgagcagcagcaagcacagcagcgtgttcaactacagcgccctgttcctgagcctgttcctgcagcagatggaccagaacagcctgcaccacctggacagcccgaagatcgagaacgagtacgagccggacagcctgtacgacatgctggacaagctgccgccgctggacagcctgctggacatggaggacctgaagccgaacgccggcctgcacttccagttccactacaacagcttcgaggacttcttcgagaacatcgaggtggacaacaccatcccgagcgacatccacctgctgacccaggagccgtacttcagcagcgacagcagcagcagcagcccgctggccatccagaacgacggcctgatcagcaacgtgaaggtggagaaggtgaccgtgaagaagaagaggaacctgaagaagaagaggcaggacaagctggagatgagcgagatcaagcagttcttcgacaggccgatcatgaaggccgccaaggagctgaacgtgggcctgaccgtgctgaagaagaggtgcagggagctgggcatctacaggtggccgcacaggaagctgaagagcctgaacagcctgatcaagaacctgaagaacgtgggcatggaggaggaggtgaagaacctggaggagcacaggttcctgatcgagcaggagccggacgccgagctgagcgacggcaccaagaagctgaggcaggcctgcttcaaggccaactacaagaggaggaagagcctgggcgacgactactactaa

SEQ ID NO: 317 - protein, 256 aa, Arabidopsis thaliana
MSSSKHSSVFNYSALFLSLFLQQMDQNSLHHLDSPKIENEYEPDSLYDMLDKLPPLDSLLDMEDLKPNAGLHFQFHYNSFEDFFENIEVDNTIPSDIHLLTQEPYFSSDSSSSSPLAIQNDGLISNVKVEKVTVKKKRNLKKKRQDKLEMSEIKQFFDRPIMKAAKELNVGLTVLKKRCRELGIYRWPHRKLKSLNSLIKNLKNVGMEEEVKNLEEHRFLIEQEPDAELSDGTKKLRQACFKANYKRRKSLGDDYY

SEQ ID NO: 318 - DNA, 1092 bp, Artificial Sequence
  MO-LEC2
atggacaacttcctgccgttcccgagcagcaacgccaacagcgtgcaggagctgagcatggacccgaacaacaacaggagccacttcaccaccgtgccgacctacgaccaccaccaggcccagccgcaccacttcctgccgccgttcagctacccggtggagcagatggccgccgtgatgaacccgcagccggtgtacctgagcgagtgctacccgcagatcccggtgacccagaccggcagcgagttcggcagcctggtgggcaacccgtgcctgtggcaggagaggggcggcttcctggacccgaggatgaccaagatggccaggatcaacaggaagaacgccatgatgaggagcaggaacaacagcagcccgaacagcagcccgagcgagctggtggacagcaagaggcagctgatgatgctgaacctgaagaacaacgtgcagatcagcgacaagaaggacagctaccagcagagcaccttcgacaacaagaagctgagggtgctgtgcgagaaggagctgaagaacagcgacgtgggcagcctgggcaggatcgtgctgccgaagagggacgccgaggccaacctgccgaagctgagcgacaaggagggcatcgtggtgcagatgagggacgtgttcagcatgcagagctggagcttcaagtacaagttctggagcaacaacaagagcaggatgtacgtgctggagaacaccggcgagttcgtgaagcagaacggcgccgagatcggcgacttcctgaccatctacgaggacgagagcaagaacctgtacttcgccatgaacggcaacagcggcaagcagaacgagggcagggagaacgagagcagggagaggaaccactacgaggaggccatgctggactacatcccgagggacgaggaggaggccagcatcgccatgctgatcggcaacctgaacgaccactacccgatcccgaacgacctgatggacctgaccaccgacctgcagcaccaccaggccaccagcagcagcatgccgccggaggaccacgcctacgtgggcagcagcgacgaccaggtgagcttcaacgacttcgagtggtggtag

SEQ ID NO: 319 - protein, 363 aa, Arabidopsis thaliana
MDNFLPFPSSNANSVQELSMDPNNNRSHFTTVPTYDHHQAQPHHFLPPFSYPVEQMAAVMNPQPVYLSECYPQIPVTQTGSEFGSLVGNPCLWQERGGFLDPRMTKMARINRKNAMMRSRNNSSPNSSPSELVDSKRQLMMLNLKNNVQISDKKDSYQQSTFDNKKLRVLCEKELKNSDVGSLGRIVLPKRDAEANLPKLSDKEGIVVQMRDVFSMQSWSFKYKFWSNNKSRMYVLENTGEFVKQNGAEIGDFLTIYEDESKNLYFAMNGNSGKQNEGRENESRERNHYEEAMLDYIPRDEEEASIAMLIGNLNDHYPIPNDLMDLTTDLQHHQATSSSMPPEDHAYVGSSDDQVSFNDFEWW

SEQ ID NO: 320 - DNA, 639 bp, Artificial Sequence
  Maize-optimized RAP2.6L
atggtgagcgccctgagcagggtgatcgagaacccgaccgacccgccggtgaagcaggagctggacaagagcgaccagcaccagccggaccaggaccagccgaggaggaggcactacaggggcgtgaggcagaggccgtggggcaagtgggccgccgagatcagggacccgaagaaggccgccagggtgtggctgggcaccttcgagaccgccgaggaggccgccctggcctacgacagggccgccctgaagttcaagggcaccaaggccaagctgaacttcccggagagggtgcagggcccgaccaccaccaccaccatcagccacgccccgaggggcgtgagcgagagcatgaacagcccgccgccgaggccgggcccgccgagcaccaccaccaccagctggccgatgacctacaaccaggacatcctgcagtacgcccagctgctgaccagcaacaacgaggtggacctgagctactacaccagcaccctgttcagccagccgttcagcaccccgagcagcagcagcagcagcagccagcagacccagcagcagcagctgcagcagcagcagcagcagagggaggaggaggagaagaactacggctacaactactacaactacccgagggagtag

SEQ ID NO: 321 - protein, 212 aa, Arabidopsis thaliana
MVSALSRVIENPTDPPVKQELDKSDQHQPDQDQPRRRHYRGVRQRPWGKWAAEIRDPKKAARVWLGTFETAEEAALAYDRAALKFKGTKAKLNFPERVQGPTTTTTISHAPRGVSESMNSPPPRPGPPSTTTTSWPMTYNQDILQYAQLLTSNNEVDLSYYTSTLFSQPFSTPSSSSSSSQQTQQQQLQQQQQQREEEEKNYGYNYYNYPRE

SEQ ID NO: 322 - DNA, 117 bp, Arabidopsis thaliana
caccttgctagttggatattacctcttctcttcaaagtatccttgaacgctcaccggttatcaaatctctacactatagctctgtagtcttgctagatagttagttctttagctctc

SEQ ID NO: 323 - DNA, 1542 bp, Zea mays
atgattcacattgtggatcatgttgatttagatgcttggagtgtgcctgaggtccttagaccactttatgaatccccgaagattcttgcacagaaaacaactattgctgcactgcgtcacattaggcaaattgcgcatgaatctagtggggaaatgccctatggagggggccgacagccagcagttttgagaacatttagccagaggcttagcaggggtttcaatgatgctgtcaatgggtttccagatgacggttggtcactgatgagcagtgacggtgctgaggatgttactattgctatcaactcttctccaaacaaacttattggtcctcatgtcaactcttcccagctgtttactgcgatcggaggtggcatcctgtgtgctaaggcatcaatgctgcttcagaatgtgccacctgccctactagtacgatttctgagggagcatcgctccgaatgggctgatcctggtgttgatgcttattctgccgctgctcttagggctagtccatatgcagttcctggcttgcgtgctagtgggtttatgggcagccaggttattctgccgcttgcacataccttagagcacgaagagttcttggaggttattaggcttgagggacacagcctctgccatgacgaagttgttctgtcacgagatatgtatcttctgcagttgtgcagtggtgtggatgaaaatgcagctggtgcatgtgcacagcttgtgtttgcacccatcgatgaatcttttgccgacgatgcgccactgctaccctcaggcttccgtgtcattccactggatgcaaagacggatccaccatcaggcacacgcacacttgacctcgcatctaccctcgaggttggatctggtgggacaacgcgtgcttcgagtgacgcctccagcacctgcaacacaagatcagtgctgaccattgctttccagttctcatatgagaatcacctacgagagagcgtcgcagccatggccaggcaatacgtcaggactgtggtggcgtcggtgcagagggtagccatggcaatagctccttcgcgcattggtggacagcttgaaatgaagcaaactccaggatctcctgaggcacacacgctggcaaggtggatcggcaggagctacaggttccacactggagccgaactcctccgcacggacacccaatgcacggatgcttccttgaaagcgctgtggcaacactcggactcgatcatgtgctgttccctgaaggctgctcccgtgttcacctttgccaaccaagccggcctggacatgctggagacgacgctgattgcgctccaggacatctcccttgagaagatccttgatgacgatggcaggaaggcgctctgcaccgagtaccctaagattatgcaacagggcttcgcgtacctccccggtggcgtgtgtgtgtcgagcatggggcggccggtgtcgtacgagcaggcggtggcgtggaaggtcctgagcgacgacgacaccccgcactgccttgccttcatgttcgtgaactggtccttcgtgtga

SEQ ID NO: 324 - protein, 513 aa, Zea mays
MIHIVDHVDLDAWSVPEVLRPLYESPKILAQKTTIAALRHIRQIAHESSGEMPYGGGRQPAVLRTFSQRLSRGFNDAVNGFPDDGWSLMSSDGAEDVTIAINSSPNKLIGPHVNSSQLFTAIGGGILCAKASMLLQNVPPALLVRFLREHRSEWADPGVDAYSAAALRASPYAVPGLRASGFMGSQVILPLAHTLEHEEFLEVIRLEGHSLCHDEVVLSRDMYLLQLCSGVDENAAGACAQLVFAPIDESFADDAPLLPSGFRVIPLDAKTDPPSGTRTLDLASTLEVGSGGTTRASSDASSTCNTRSVLTIAFQFSYENHLRESVAAMARQYVRTVVASVQRVAMAIAPSRIGGQLEMKQTPGSPEAHTLARWIGRSYRFHTGAELLRTDTQCTDASLKALWQHSDSIMCCSLKAAPVFTFANQAGLDMLETTLIALQDISLEKILDDDGRKALCTEYPKIMQQGFAYLPGGVCVSSMGRPVSYEQAVAWKVLSDDDTPHCLAFMFVNWSFV

SEQ ID NO: 325 - DNA, 1080 bp, Zea mays
atggaggagatcacccaacactttggagttggcgcaagcagccacggccatggccacggccagcaccaccatcatcaccaccaccaccacccgtgggcatcctccctcagcgccgtcgtagcgccgctgccgccgcaaccgccaagcgcaggcctgccgctgaccctgaacacggtggcggccactgggaacagcggcggtagcggcaacccggtgctgcagcttgccaacggtggcggcctcctcgacgcatgcgtcaaggcgaaggagccctcgtcgtcgtctccctacgcaggcgacgtcgaggccatcaaggccaagatcatctcgcacccacactactactcgctcctcactgcctacctcgagtgcaacaaggtgggggcaccaccggaggtgtcggcgaggctgacggagatagcgcaggaggtggaggcgcggcagcgcacggcgctcggcggcctggccgctgcgacggagccggagctggaccagttcatggaggcgtaccacgagatgctggtgaagttcagggaggagctgacgaggccgctgcaggaggcgatggagttcatgcgaagggtggagtcgcagctgaactcgctttccatctccggaaggtcgctgcgcaacatcctttcatctggctcttctgaggaggatcaagaaggtagcggaggagagaccgagctccctgaagttgatgcacatggtgtggaccaagagctgaagcaccatctcctgaagaaatacagtggctatctaagctcgctcaagcaagaactgtcaaagaagaagaagaaagggaagctccccaaggaggctcgccagcagctccttagctggtgggatcagcactacaaatggccttacccctcagagactcagaaggtggcactggctgagtctaccgggcttgacctgaagcagatcaacaactggttcatcaaccagcggaagcggcactggaagccatccgaggagatgcaccacctgatgatggacgggtaccacaccaccaatgccttctacatggacggccacttcatcaacgacggcgggctgtaccggctcggctag

SEQ ID NO: 326 - protein, 359 aa, Zea mays
MEEITQHFGVGASSHGHGHGQHHHHHHHHHPWASSLSAVVAPLPPQPPSAGLPLTLNTVAATGNSGGSGNPVLQLANGGGLLDACVKAKEPSSSSPYAGDVEAIKAKIISHPHYYSLLTAYLECNKVGAPPEVSARLTEIAQEVEARQRTALGGLAAATEPELDQFMEAYHEMLVKFREELTRPLQEAMEFMRRVESQLNSLSISGRSLRNILSSGSSEEDQEGSGGETELPEVDAHGVDQELKHHLLKKYSGYLSSLKQELSKKKKKGKLPKEARQQLLSWWDQHYKWPYPSETQKVALAESTGLDLKQINNWFINQRKRHWKPSEEMHHLMMDGYHTTNAFYMDGHFINDGGLYRLG

SEQ ID NO: 327 - DNA, 500 bp, Arabidopsis thaliana
ttcaaagccaatgactgttgttaggtccagtttctaaggacgaatcatccaatcactggttctttctgaacaaaacaaagagctatagagttacgttactgtagccgagacagagcctgcaatctggttatgccacatactaggttctttcttaaagttgactcactctatcctaagttctacttacaaggagctacaacaaattggtcataaccggagagcgttcaaggaggtaatatcccatcttactctgtagcaaggctacaaaaggagagctaaagaactaggctacaaaaagagagctaaagaactaactatctagcaagactacagagctatagtgtagagatttcataaccggtgagcgttcaaggatactttgaagagaagaggtaatatctcaactagcaagactacaaaaaaatggagatataaaactaactgtctaacaagactacagagctatagtagagatagatacgttcgacacttaagcatga

SEQ ID NO: 328 - DNA, 1068 bp, Zea mays
atggcgcccagcagctacgaggtggcggcttccatcctcctctgcgccgaggacagcagcagcatcctggacctcgaagcggaggccgaggaggaagcgctactggcgcggagcggggagcccggcggcggcgcggagttccccgtgccgtccgaggaatgcgtcgccggtttcctggagtctgaggcagcgcacatgccgcgggaggactacgccgagaggctgcgcagcggggggatggatctccgcgtccggacggacgccatcgactggatttggaaggttcacacgtgctacggtttcggccctctcactgcctgcttggccgtcaactacctggaccgcttcctctcgctctaccagcttccggaaggcaaggcttggatgacacagctgctgtccgtggcgtgcttgtccctggccgccaagatggaggagacctacgtcccttcgtccctggacctgcaggccggggacgcgcggtacgtgttcgaggcgaagacgatccagaggatggagctcctggtcctcagcacgctcaagtggaggatgcaagcggtcacccccttgtcgtacgtcgactacttcctccaccggctccgaggcggcgccgcgccgagcagacgcgccgtcctccgatccgcggagctcatcctgtgcatcgccagagggacgcactgcttggatttcaggccctcggagatcgccttggccgtcgccgccaccgtggccggcgaagagcgcgccgtggacatcgacagggccttcacccaccgtgtacataaggagagggtgtcgcgatgcctcgaagcgatccagcaggccaccgccaccatggccctgccgcagccgctgaaaagtgaaggcccgagcagcagcggccgcagggcctcgtcttcctcggccaccgtgccgcggagccccaccggggtgctggacgctggctgcctgagctacaggagagccgccgccgccgccgcctcgcacgcgagctccagctggcgcgacgaggacgacgacgactgccccccggctgtctgcagcaagaggaggaagattagcagatga

SEQ ID NO: 329 - protein, 355 aa, Zea mays
MAPSSYEVAASILLCAEDSSSILDLEAEAEEEALLARSGEPGGGAEFPVPSEECVAGFLESEAAHMPREDYAERLRSGGMDLRVRTDAIDWIWKVHTCYGFGPLTACLAVNYLDRFLSLYQLPEGKAWMTQLLSVACLSLAAKMEETYVPSSLDLQAGDARYVFEAKTIQRMELLVLSTLKWRMQAVTPLSYVDYFLHRLRGGAAPSRRAVLRSAELILCIARGTHCLDFRPSEIALAVAATVAGEERAVDIDRAFTHRVHKERVSRCLEAIQQATATMALPQPLKSEGPSSSGRRASSSSATVPRSPTGVLDAGCLSYRRAAAAAASHASSSWRDEDDDDCPPAVCSKRRKISR

SEQ ID NO: 330 - DNA, 1998 bp, Zea mays
ttcacaaactcaatacaacacacagtggagtagggtattacgctccggcggcccgaaccactctaaatccttgtgtcctcgtgtgctcttccaccattaatgactgtaattgcagggacacgaagagttgtagcgcttttgccaacaagatccgctatatgctagtagagtggaacctgcacagcaacaagcatccaataatctgagaataagaattatgtgtggtgatggttctcatctctgcaactcgccattttcgcgagagaaccaaatccaagttggtgaagatcatgatttgggctcatgggctggcatagtagctattacctttgcaattgtggttcgaatctatccgatattctccttttcagggagagctaatgcttatgcttattgggtattttggtttgacactgcttcacgcccaaaaaaaggcaactatgtctgagttggatatggcccaaaaaaaggcagctatgtctgagttggatatggaagtcttctttcgtttagggtgaagtaagaccaagctcatgagcttattatcttaggtcggaacaaattagttgataggcatggcacatttatcaaattataatgattttaacagaaaagcaacacctctttttcagcagcaccagctttgcaagctgcaattgacactccaagcatagtatttgctccaaactcagcctgcatttcgcacaatatcatatctatttccatttggataaaatatattttccagaaatatgggaacagaatcaagatacagaaaaaagttgtggtagtagtggtaagtggaaacacaagtacagtgaaaagatagcattatttctgaacagtcaaattaaccgaaataagtagtatcacatactgcccctaaattgactacacccaatgtaaagaattgcttgagcatattgagccatcagttgtttgtttgtgtaacggatttgacaatgcagagttcaggagcaaaaaaccgcaaaggagagaaagagggaaaggatctcctagtatcccaccttgtggcgcgccctgtcaagtgcatgatggcctggtcgatctgcgtctgctgctgcggttccatcccaacgagtgcctccgacaccttgtcgttgatcacccgcaccgcgtaggcgacccccctggcgaggaacttccgcctctcggaggccccggccgcgtcggcggcggcgccctcgagcgcgcccacgctagccgtagatgctcggtgcacggccttgttggtgtgcaactcgacctcaacggccggtgcgctacgcccgtcaaggatctggcgcgcccgcaccctcgtgatcacggtgggcgcctcccgcctcatgtggccgacgatgaaaagcgccgggttaggggccttggcgcgcaccgccgtattcagggcctcctcgctcttgcgcgagagcaggtgcttccccaggtactcctgcactgacaaggctgccacagcggtggaatttgtcctcacgacttcgccacgtcgtcctcacctccctggcttcccacgactccgccgtatcgaggtgctcggtgggtcgtcttaatccgaagtccgaactaggaagacgagacagagaggtctgaggaatgggcctcgtttgatgttgagctgaattatttttccagcataagcccaggtcttggtccatgaacaaaattactagaaacccagcccagtactacgatctaaaagagggactgccactggatagctctctctagcattctccacgctccaatacagcggcgtcgtgtctatccgggtctatccgcgaacacgtgagaactctccagaaactgctttctcctccacttcatctctctcgctttccctctataaaaagaccccttctaggaattgagggagacagcaagcaccaagcagcgatccgaagctcaatcaattcactcaaacctcttccccaaatcttcgattagatcttcgttgacaagaagactagaaccgaacctgac

SEQ ID NO: 331 - DNA, 508 bp, Zea mays
ctatagtattttaaaattgcattaacaaacatgtcctaattggtactcctgagatactataccctcctgttttaaaatagttggcattatcgaattatcattttactttttaatgttttctcttcttttaatatattttatgaattttaatgtattttaaaatgttatgcagttcgctctggacttttctgctgcgcctacacttgggtgtactgggcctaaattcagcctgaccgaccgcctgcattgaataatggatgagcaccggtaaaatccgcgtacccaactttcgagaagaaccgagacgtggcgggccgggccaccgacgcacggcaccagcgactgcacacgtcccgccggcgtacgtgtacgtgctgttccctcactggccgcccaatccactcatgcatgcccacgtacacccctgccgtggcgcgcccagatcctaatcctttcgccgttctgcacttctgctgcctataaatggcggcatcgaccgtcacctgct

SEQ ID NO: 332 - DNA, 1435 bp, Zea mays
gagagcttgccgagtgccatccttggacactcgataaagtatattttattttttttattttgccaaccaaactttttgtggtatgttcctacactatgtagatctacatgtaccattttggcacaattacatatttacaaaaatgttttctataaatattagatttagttcgtttatttgaatttcttcggaaaattcacatttaaactgcaagtcactcgaaacatggaaaaccgtgcatgcaaaataaatgatatgcatgttatctagcacaagttacgaccgatttcagaagcagaccagaatcttcaagcaccatgctcactaaacatgaccgtgaacttgttatctagttgtttaaaaattgtataaaacacaaataaagtcagaaattaatgaaacttgtccacatgtcatgatatcatatatagaggttgtgataaaaatttgataatgtttcggtaaagttgtgacgtactatgtgtagaaacctaagtgacctacacataaaatcatagagtttcaatgtagttcactcgacaaagactttgtcaagtgtccgataaaaagtactcgacaaagaagccgttgtcgatgtactgttcgtcgagatctctttgtcgagtgtcacactaggcaaagtctttacggagtgtttttcaggctttgacactcggcaaagcgctcgattccagtagtgacagtaatttgcatcaaaaatagctgagagatttaggccccgtttcaatctcacgggataaagtttagcttcctgctaaactttagctatatgaattgaagtgctaaagtttagtttcaattaccaccattagctctcctgtttagattacaaatggctaaaagtagctaaaaaatagctgctaaagtttatctcgcgagattgaaacagggccttaaaatgagtcaactaatagaccaactaattattagctattagtcgttagcttctttaatctaagctaaaaccaactaatagcttatttgttgaattacaattagctcaacggaattctctgtttttctaaaaaaaaactgcccctctcttacagcaaattgtccgctgcccgtcgtccagatacaatgaacgtacctagtaggaactcttttacacgctcggtcgctcgccgcggatcggagtccccggaacacgacaccactgtggaacacgacaaagtctgctcagaggcggccacaccctggcgtgcaccgagccggagcccggataagcacggtaaggagagtacggcgggacgtggcgacccgtgtgtctgctgccacgcagccttcctccacgtagccgcgcggccgcgccacgtaccagggcccggcgctggtataaatcccgcgccacctccgctttagttctgcatacagccaacccaaggatccaacacacacccgaggatatcacagt

SEQ ID NO: 333 - DNA, 896 bp, Zea mays
gtgcagcgtgacccggtcgtgcccctctctagagataatgagcattgcatgtctaagttataaaaaattaccacatattttttttgtcacacttgtttgaagtgcagtttatctatctttatacatatatttaaactttactctacgaataatataatctatagtactacaataatatcagtgttttagagaatcatataaatgaacagttagacatggtctaaaggacaattgagtattttgacaacaggactctacagttttatctttttagtgtgcatgtgttctcctttttttttgcaaatagcttcacctatataatacttcatccattttattagtacatccatttagggtttagggttaatggtttttatagactaatttttttagtacatctattttattctattttagcctctaaattaagaaaactaaaactctattttagtttttttatttaataatttagatataaaatagaataaaataaagtgactaaaaattaaacaaataccctttaagaaattaaaaaaactaaggaaacatttttcttgtttcgagtagataatgccagcctgttaaacgccgtcgacgagtctaacggacaccaaccagcgaaccagcagcgtcgcgtcgggccaagcgaagcagacggcacggcatctctgtcgctgcctctggacccctctcgagagttccgctccaccgttggacttgctccgctgtcggcatccagaaattgcgtggcggagcggcagacgtgagccggcacggcaggcggcctcctcctcctctcacggcaccggcagctacgggggattcctttcccaccgctccttcgctttcccttcctcgcccgccgtaataaatagacaccccctccacaccctctt

SEQ ID NO: 334 - DNA, 82 bp, Zea mays
tccccaacctcgtgttgttcggagcgcacacacacacaaccagatctcccccaaatccacccgtcggcacctccgcttcaag

SEQ ID NO: 335 - DNA, 1010 bp, Zea mays
gtacgccgctcgtcctccccccccccccctctctaccttctctagatcggcgttccggtccatggttagggcccggtagttctacttctgttcatgtttgtgttagatccgtgtttgtgttagatccgtgctgctagcgttcgtacacggatgcgacctgtacgtcagacacgttctgattgctaacttgccagtgtttctctttggggaatcctgggatggctctagccgttccgcagacgggatcgatttcatgattttttttgtttcgttgcatagggtttggtttgcccttttcctttatttcaatatatgccgtgcacttgtttgtcgggtcatcttttcatgcttttttttgtcttggttgtgatgatgtggtctggttgggcggtcgttctagatcggagtagaattctgtttcaaactacctggtggatttattaattttggatctgtatgtgtgtgccatacatattcatagttacgaattgaagatgatggatggaaatatcgatctaggataggtatacatgttgatgcgggttttactgatgcatatacagagatgctttttgttcgcttggttgtgatgatgtggtgtggttgggcggtcgttcattcgttctagatcggagtagaatactgtttcaaactacctggtgtatttattaattttggaactgtatgtgtgtgtcatacatcttcatagttacgagtttaagatggatggaaatatcgatctaggataggtatacatgttgatgtgggttttactgatgcatatacatgatggcatatgcagcatctattcatatgctctaaccttgagtacctatctattataataaacaagtatgttttataattattttgatcttgatatacttggatgatggcatatgcagcagctatatgtggatttttttagccctgccttcatacgctatttatttgcttggtactgtttcttttgtcgatgctcaccctgttgtttggtgttacttctgcag

SEQ ID NO: 336 - DNA, 202 bp, Figwort Mosaic Virus
atcgagcagctggcttgtggggaccagacaaaaaaggaatggtgcagaattgttaggcgcacctaccaaaagcatctttgcctttattgcaaagataaagcagattcctctagtacaagtggggaacaaaataacgtggaaaagagctgtcctgacagcccactcactaatgcgtatgacgaacgcagtgacgaccacaaaa

SEQ ID NO: 337 - DNA, 184 bp, Peanut Chlorotic Streak Caulimovirus
caacgagatcatgagccaatcaaagaggagtgatgtagacctaaagcaataatggagccatgacgtaagggcttacgcccatacgaaataattaaaggctgatgtgacctgtcggtctctcagaacctttactttttatgtttggcgtgtatttttaaatttccacggcaatgacgatgtgacc

SEQ ID NO: 338 - DNA, 187 bp, Mirabilis Mosaic Virus
ccactaaaacattgctttgtcaaaagctaaaaaagatgatgcccgacagccacttgtgtgaagcatgagaagccggtccctccactaagaaaattagtgaagcatcttccagtggtccctccactcacagctcaatcagtgagcaacaggacgaaggaaatgacgtaagccatgacgtctaatccca

SEQ ID NO: 339 - DNA, 1988 bp, Zea mays
gtgcagcgtgacccggtcgtgcccctctctagagataatgagcattgcatgtctaagttataaaaaattaccacatattttttttgtcacacttgtttgaagtgcagtttatctatctttatacatatatttaaactttactctacgaataatataatctatagtactacaataatatcagtgttttagagaatcatataaatgaacagttagacatggtctaaaggacaattgagtattttgacaacaggactctacagttttatctttttagtgtgcatgtgttctcctttttttttgcaaatagcttcacctatataatacttcatccattttattagtacatccatttagggtttagggttaatggtttttatagactaatttttttagtacatctattttattctattttagcctctaaattaagaaaactaaaactctattttagtttttttatttaataatttagatataaaatagaataaaataaagtgactaaaaattaaacaaataccctttaagaaattaaaaaaactaaggaaacatttttcttgtttcgagtagataatgccagcctgttaaacgccgtcgacgagtctaacggacaccaaccagcgaaccagcagcgtcgcgtcgggccaagcgaagcagacggcacggcatctctgtcgctgcctctggacccctctcgagagttccgctccaccgttggacttgctccgctgtcggcatccagaaattgcgtggcggagcggcagacgtgagccggcacggcaggcggcctcctcctcctctcacggcaccggcagctacgggggattcctttcccaccgctccttcgctttcccttcctcgcccgccgtaataaatagacaccccctccacaccctctttccccaacctcgtgttgttcggagcgcacacacacacaaccagatctcccccaaatccacccgtcggcacctccgcttcaaggtacgccgctcgtcctccccccccccccctctctaccttctctagatcggcgttccggtccatggttagggcccggtagttctacttctgttcatgtttgtgttagatccgtgtttgtgttagatccgtgctgctagcgttcgtacacggatgcgacctgtacgtcagacacgttctgattgctaacttgccagtgtttctctttggggaatcctgggatggctctagccgttccgcagacgggatcgatttcatgattttttttgtttcgttgcatagggtttggtttgcccttttcctttatttcaatatatgccgtgcacttgtttgtcgggtcatcttttcatgcttttttttgtcttggttgtgatgatgtggtctggttgggcggtcgttctagatcggagtagaattctgtttcaaactacctggtggatttattaattttggatctgtatgtgtgtgccatacatattcatagttacgaattgaagatgatggatggaaatatcgatctaggataggtatacatgttgatgcgggttttactgatgcatatacagagatgctttttgttcgcttggttgtgatgatgtggtgtggttgggcggtcgttcattcgttctagatcggagtagaatactgtttcaaactacctggtgtatttattaattttggaactgtatgtgtgtgtcatacatcttcatagttacgagtttaagatggatggaaatatcgatctaggataggtatacatgttgatgtgggttttactgatgcatatacatgatggcatatgcagcatctattcatatgctctaaccttgagtacctatctattataataaacaagtatgttttataattattttgatcttgatatacttggatgatggcatatgcagcagctatatgtggatttttttagccctgccttcatacgctatttatttgcttggtactgtttcttttgtcgatgctcaccctgttgtttggtgttacttctgcag

SEQ ID NO: 340 - DNA, 573 bp, Artificial Sequence
  3xENH
atcgagcagctggcttgtggggaccagacaaaaaaggaatggtgcagaattgttaggcgcacctaccaaaagcatctttgcctttattgcaaagataaagcagattcctctagtacaagtggggaacaaaataacgtggaaaagagctgtcctgacagcccactcactaatgcgtatgacgaacgcagtgacgaccacaaaacaacgagatcatgagccaatcaaagaggagtgatgtagacctaaagcaataatggagccatgacgtaagggcttacgcccatacgaaataattaaaggctgatgtgacctgtcggtctctcagaacctttactttttatgtttggcgtgtatttttaaatttccacggcaatgacgatgtgaccccactaaaacattgctttgtcaaaagctaaaaaagatgatgcccgacagccacttgtgtgaagcatgagaagccggtccctccactaagaaaattagtgaagcatcttccagtggtccctccactcacagctcaatcagtgagcaacaggacgaaggaaatgacgtaagccatgacgtctaatccca

SEQ ID NO: 341 - DNA, 19057 bp, Artificial Sequence
  PHV00001
gtttacccgccaatatatcctgtcaaacactgcggccgcacttgaccgcggatggagccggagctgtggtgaggccatcgacgggaggtgggggagaacacagtctcagtgttctttgtgagtccgcaaggtttttagcttttctgtattaattaaggttgctgttggctgtagaatacggtcgtggaagagctgtatcggtagctactacgtaagctattatatactggaagtctggagctcgtcgatctccggtcgtcttcctccatttctcctcgtcttgctttgactgctgctaccatttgcttctgttttctgatgaagcatgccatgtcggccaccagtgtttgtgtggtttttgcagggaatggctttcaagtgctgtgattgaatggccctcgtcgtcctcggctgagctcacatggacgcgtcatgtgagtgagatatatgatcatatgatgagtggggttcgggtgagtgcgtacttgaagtaggatcccgctttcactcattcattcattggcctttaaaccgggaaattttcgcgaggagatggagggaagcaagcagggtgacgagtgcagagtgccgcgagcgctttgtcaaaaggcaccgccgtaggcaaaaaaatcaatggccctgactgactcgatggtagtactactgtagagactagagagggttgctccccatatcttcgtgtgacttttactccagcattgcatttccgtcattgagacgttaattaatagcagctttcgggacagatgactgtggccatgtttcgtcacggccgcttcgtgccagctgggggtactatagtactgtgattttgttagtaaaaactttcattaggccaccattgacgaccgggccttcgcttttgctgcgctaattaaccatttcccggcgaccgaagggaacatgaacatgccccgacacatgagggcatgaggactagtgttctccctgtcgttcgttgacttgactagtgatagtttaaacgctcttcaactggaagagcggttactaccggttcactagctagctgctaatcgagctagttaccctatgaggtgacatgaagcgctcacggttactatgacggttagcttcacgactgttggtggcagtagcgtacgacttagctatagttccggacttacctagctaataacttcgtatagcatacattatacgaagttatggttaccgagctgttaccaagcggccgcacgtcacggtcactacgaatcgaccgaagcttgcatgggccgcatcgagcagctggcttgtggggaccagacaaaaaaggaatggtgcagaattgttaggcgcacctaccaaaagcatctttgcctttattgcaaagataaagcagattcctctagtacaagtggggaacaaaataacgtggaaaagagctgtcctgacagcccactcactaatgcgtatgacgaacgcagtgacgaccacaaaactcgagcaacgagatcatgagccaatcaaagaggagtgatgtagacctaaagcaataatggagccatgacgtaagggcttacgcccatacgaaataattaaaggctgatgtgacctgtcggtctctcagaacctttactttttatgtttggcgtgtatttttaaatttccacggcaatgacgatgtgaccgtcgacccactaaaacattgctttgtcaaaagctaaaaaagatgatgcccgacagccacttgtgtgaagcatgagaagccggtccctccactaagaaaattagtgaagcatcttccagtggtccctccactcacagctcaatcagtgagcaacaggacgaaggaaatgacgtaagccatgacgtctaatcccagggccagcttgcatgcctgcagtgcagcgtgacccggtcgtgcccctctctagagataatgagcattgcatgtctaagttataaaaaattaccacatattttttttgtcacacttgtttgaagtgcagtttatctatctttatacatatatttaaactttactctacgaataatataatctatagtactacaataatatcagtgttttagagaatcatataaatgaacagttagacatggtctaaaggacaattgagtattttgacaacaggactctacagttttatctttttagtgtgcatgtgttctcctttttttttgcaaatagcttcacctatataatacttcatccattttattagtacatccatttagggtttagggttaatggtttttatagactaatttttttagtacatctattttattctattttagcctctaaattaagaaaactaaaactctattttagtttttttatttaataatttagatataaaatagaataaaataaagtgactaaaaattaaacaaataccctttaagaaattaaaaaaactaaggaaacatttttcttgtttcgagtagataatgccagcctgttaaacgccgtcgacgagtctaacggacaccaaccagcgaaccagcagcgtcgcgtcgggccaagcgaagcagacggcacggcatctctgtcgctgcctctggacccctctcgagagttccgctccaccgttggacttgctccgctgtcggcatccagaaattgcgtggcggagcggcagacgtgagccggcacggcaggcggcctcctcctcctctcacggcaccggcagctacgggggattcctttcccaccgctccttcgctttcccttcctcgcccgccgtaataaatagacaccccctccacaccctctttccccaacctcgtgttgttcggagcgcacacacacacaaccagatctcccccaaatccacccgtcggcacctccgcttcaaggtacgccgctcgtcctcccccccccccctctctaccttctctagatcggcgttccggtccatgcatggttagggcccggtagttctacttctgttcatgtttgtgttagatccgtgtttgtgttagatccgtgctgctagcgttcgtacacggatgcgacctgtacgtcagacacgttctgattgctaacttgccagtgtttctctttggggaatcctgggatggctctagccgttccgcagacgggatcgatttcatgattttttttgtttcgttgcatagggtttggtttgcccttttcctttatttcaatatatgccgtgcacttgtttgtcgggtcatcttttcatgcttttttttgtcttggttgtgatgatgtggtctggttgggcggtcgttctagatcggagtagaattctgtttcaaactacctggtggatttattaattttggatctgtatgtgtgtgccatacatattcatagttacgaattgaagatgatggatggaaatatcgatctaggataggtatacatgttgatgcgggttttactgatgcatatacagagatgctttttgttcgcttggttgtgatgatgtggtgtggttgggcggtcgttcattcgttctagatcggagtagaatactgtttcaaactacctggtgtatttattaattttggaactgtatgtgtgtgtcatacatcttcatagttacgagtttaagatggatggaaatatcgatctaggataggtatacatgttgatgtgggttttactgatgcatatacatgatggcatatgcagcatctattcatatgctctaaccttgagtacctatctattataataaacaagtatgttttataattattttgatcttgatatacttggatgatggcatatgcagcagctatatgtggatttttttagccctgccttcatacgctatttatttgcttggtactgtttcttttgtcgatgctcaccctgttgtttggtgttacttctgcaggtcgactttaacttagcctaggatccatggccactgtgaacaactggctcgctttctccctctccccgcaggagctgccgccctcccagacgacggactccacactcatctcggccgccaccgccgaccatgtctccggcgatgtctgcttcaacatcccccaagattggagcatgaggggatcagagctttcggcgctcgtcgcggagccgaagctggaggacttcctcggcggcatctccttctccgagcagcatcacaaggccaactgcaacatgatacccagcactagcagcacagtttgctacgcgagctcaggtgctagcaccggctaccatcaccagctgtaccaccagcccaccagctcagcgctccacttcgcggactccgtaatggtggcttcctcggccggtgtccacgacggcggtgccatgctcagcgcggccgccgctaacggtgtcgctggcgctgccagtgccaacggcggcggcatcgggctgtccatgattaagaactggctgcggagccaaccggcgcccatgcagccgagggtggcggcggctgagggcgcgcaggggctctctttgtccatgaacatggcggggacgacccaaggcgctgctggcatgccacttctcgctggagagcgcgcacgggcgcccgagagtgtatcgacgtcagcacagggtggagccgtcgtcgtcacggcgccgaaggaggatagcggtggcagcggtgttgccggcgctctagtagccgtgagcacggacacgggtggcagcggcggcgcgtcggctgacaacacggcaaggaagacggtggacacgttcgggcagcgcacgtcgatttaccgtggcgtgacaaggcatagatggactgggagatatgaggcacatctttgggataacagttgcagaagggaagggcaaactcgtaagggtcgtcaagtctatttaggtggctatgataaagaggagaaagctgctagggcttatgatcttgctgctctgaagtactggggtgccacaacaacaacaaattttccagtgagtaactacgaaaaggagctcgaggacatgaagcacatgacaaggcaggagtttgtagcgtctctgagaaggaagagcagtggtttctccagaggtgcatccatttacaggggagtgactaggcatcaccaacatggaagatggcaagcacggattggacgagttgcagggaacaaggatctttacttgggcaccttcagcacccaggaggaggcagcggaggcgtacgacatcgcggcgatcaagttccgcggcctcaacgccgtcaccaacttcgacatgagccgctacgacgtgaagagcatcctggacagcagcgccctccccatcggcagcgccgccaagcgcctcaaggaggccgaggccgcagcgtccgcgcagcaccaccacgccggcgtggtgagctacgacgtcggccgcatcgcctcgcagctcggcgacggcggagccctggcggcggcgtacggcgcgcactaccacggcgccgcctggccgaccatcgcgttccagccgggcgccgccagcacaggcctgtaccacccgtacgcgcagcagccaatgcgcggcggcgggtggtgcaagcaggagcaggaccacgcggtgatcgcggccgcgcacagcctgcaggacctccaccacctgaacctgggcgcggccggcgcgcacgactttttctcggcagggcagcaggccgccgccgctgcgatgcacggcctgggtagcatcgacagtgcgtcgctcgagcacagcaccggctccaactccgtcgtctacaacggcggggtcggcgacagcaacggcgccagcgccgtcggcggcagtggcggtggctacatgatgccgatgagcgctgccggagcaaccactacatcggcaatggtgagccacgagcaggtgcatgcacgggcctacgacgaagccaagcaggctgctcagatggggtacgagagctacctggtgaacgcggagaacaatggtggcggaaggatgtctgcatgggggactgtcgtgtctgcagccgcggcggcagcagcaagcagcaacgacaacatggccgccgacgtcgggcatggcggcgcgcagctcttcagtgtctggaacgacacttaagcgtacctagtggtacctgacatcttatagtctgcaacctctcgtgtctgaattcctatctttatcaagtgttattgcttccacgactataggacagctttcgtcgaaagcttttgctcatgtgatctcgaaggattcatctagtctgatttttcgtgacttgtatcggttttattggattcatccaacatatatcaataaaaaatgagttgtgtttcctttcttcctagttcagttaaaattatttccctcctgcgcttgtgctgtaattgtctgtgtacctgttgtttgtgactgtgttagttcccttggatatgatttcgtatttgatatgtacatggagatagcttagcttcattattggagtatgaagttagtatgacatagtcactctcctggaaaattgacactgcaaaccatatttttattctgaaccacaaatcctagtcagtccgctggcatatgccgtccgtttgctgaatccagaacgtgggtttggagatgtacggctgagatgcctctatgcgaaggggatttcgtggtgaaacgagatgggagtagagcaacgcccgtggaagatgcttcaaacttccacacttttgagcaacgatcggcagtagtaaggtagacgatttcaagatcaaagcatatgaagataaacaacatcaacaacaaaatttgttggggttctatagagagaaacagagctacatacatacactgttttgtatctaccatctgagatgatgaaaagatgaaaaactaaagaatgccccggcgccaacgccaggacacgccgcgcgcgcgtcacccgagccatctcttgacccagccggcgctgtatatttacacacgttgcagcatcgatcaccacctgttcgatcgcgtcgccgtcaccggcgcgccgcgacttattgaactagtctagggcgcggctaacaacctagcttagattgccttgtctaaacccttaggctaacgcgccactctagaaggccgatctcccccgaacgcgccagatccgatatcgatgggccctggccgaagcttggtcacccgcaccttgctagttggatattacctcttctcttcaaagtatccttgaacgctcaccggttatcaaatctctacactatagctctgtagtcttgctagatagttagttctttagctctctctagaggttcacaaactcaatacaacacacagtggagtagggtattacgctccggcggcccgaaccactctaaatccttgtgtcctcgtgtgctcttccaccattaatgactgtaattgcagggacacgaagagttgtagcgcttttgccaacaagatccgctatatgctagtagagtggaacctgcacagcaacaagcatccaataatctgagaataagaattatgtgtggtgatggttctcatctctgcaactcgccattttcgcgagagaaccaaatccaagttggtgaagatcatgatttgggctcatgggctggcatagtagctattacctttgcaattgtggttcgaatctatccgatattctccttttcagggagagctaatgcttatgcttattgggtattttggtttgacactgcttcacgcccaaaaaaaggcaactatgtctgagttggatatggcccaaaaaaaggcagctatgtctgagttggatatggaagtcttctttcgtttagggtgaagtaagaccaagctcatgagcttattatcttaggtcggaacaaattagttgataggcatggcacatttatcaaattataatgattttaacagaaaagcaacacctctttttcagcagcaccagctttgcaagctgcaattgacactccaagcatagtatttgctccaaactcagcctgcatttcgcacaatatcatatctatttccatttggataaaatatattttccagaaatatgggaacagaatcaagatacagaaaaaagttgtggtagtagtggtaagtggaaacacaagtacagtgaaaagatagcattatttctgaacagtcaaattaaccgaaataagtagtatcacatactgcccctaaattgactacacccaatgtaaagaattgcttgagcatattgagccatcagttgtttgtttgtgtaacggatttgacaatgcagagttcaggagcaaaaaaccgcaaaggagagaaagagggaaaggatctcctagtatcccaccttgtggcgcgccctgtcaagtgcatgatggcctggtcgatctgcgtctgctgctgcggttccatcccaacgagtgcctccgacaccttgtcgttgatcacccgcaccgcgtaggcgacccccctggcgaggaacttccgcctctcggaggccccggccgcgtcggcggcggcgccctcgagcgcgcccacgctagccgtagatgctcggtgcacggccttgttggtgtgcaactcgacctcaacggccggtgcgctacgcccgtcaaggatctggcgcgcccgcaccctcgtgatcacggtgggcgcctcccgcctcatgtggccgacgatgaaaagcgccgggttaggggccttggcgcgcaccgccgtattcagggcctcctcgctcttgcgcgagagcaggtgcttccccaggtactcctgcactgacaaggctgccacagcggtggaatttgtcctcacgacttcgccacgtcgtcctcacctccctggcttcccacgactccgccgtatcgaggtgctcggtgggtcgtcttaatccgaagtccgaactaggaagacgagacagagaggtctgaggaatgggcctcgtttgatgttgagctgaattatttttccagcataagcccaggtcttggtccatgaacaaaattactagaaacccagcccagtactacgatctaaaagagggactgccactggatagctctctctagcattctccacgctccaatacagcggcgtcgtgtctatccgggtctatccgcgaacacgtgagaactctccagaaactgctttctcctccacttcatctctctcgctttccctctataaaaagaccccttctaggaattgagggagacagcaagcaccaagcagcgatccgaagctcaatcaattcactcaaacctcttccccaaatcttcgattagatcttcgttgacaagaagactagaaccgaacctgacatgtccaacctgctcacggttcaccagaaccttccggctcttccagtggacgcgacgtccgatgaagtcaggaagaacctcatggacatgttccgcgacaggcaagcgttcagcgagcacacctggaagatgctgctctccgtctgccgctcctgggctgcatggtgcaagctgaacaacaggaagtggttccccgctgagcccgaggacgtgagggattaccttctgtacctgcaagcgcgaggtttgtttctgcttctacctttgatatatatataataattatcattaattagtagtaatataatatttcaaatatttttttcaaaataaaagaatgtagtatatagcaattgcttttctgtagtttataagtgtgtatattttaatttataacttttctaatatatgaccaaaacatggtgatgcctaggtctggcagtgaagaccatccagcaacaccttggacaactgaacatgcttcacaggcgctccggcctcccgcgccccagcgactcgaacgccgtgagcctcgtcatgcgccgcatcaggaaggaaaacgtcgatgccggcgaaagggcaaagcaggccctcgcgttcgagaggaccgatttcgaccaggtccgcagcctgatggagaacagcgacaggtgccaggacattaggaacctggcgttcctcggaattgcatacaacacgctcctcaggatcgcggaaattgcccgcattcgcgtgaaggacattagccgcaccgacggcggcaggatgcttatccacattggcaggaccaagacgctcgtttccaccgcaggcgtcgaaaaggccctcagcctcggagtgaccaagctcgtcgaacgctggatctccgtgtccggcgtcgcggacgacccaaacaactacctcttctgccgcgtccgcaagaacggggtggctgcccctagcgccaccagccaactcagcacgagggccttggaaggtattttcgaggccacccaccgcctgatctacggcgcgaaggatgacagcggtcaacgctacctcgcatggtccgggcactccgcccgcgttggagctgctagggacatggcccgcgccggtgtttccatccccgaaatcatgcaggcgggtggatggacgaacgtgaacattgtcatgaactacattcgcaaccttgacagcgagacgggcgcaatggttcgcctcctggaagatggtgactgaggtacccaacctagacttgtccatcttctggattggccaacttaattaatgtatgaaataaaaggatgcacacatagtgacatgctaatcactataatgtgggcatcaaagttgtgtgttatgtgtaattactagttatctgaataaaagagaaagagatcatccatatttcttatcctaaatgaatgtcacgtgtctttataattctttgatgaaccagatgcatttcattaaccaaatccatatacatataaatattaatcatatataattaatatcaattgggttagcaaaacaaatctagtctaggtgtgttttgcgatccgatatcgacgtctaaaaacggcccctaactaacgcttagttgcccgctagattagtcccccgttagtgcctagttagacacacgacgaactaggggctagtgccaccttgctagttggatattacctcttctcttcaaagtatccttgaacgctcaccggttatcaaatctctacactatagctctgtagtcttgctagatagttagttctttagctctcgcacgataacttcgtatagcatacattatacgaagttataacagcggaccgggttaccgaattcctgcccttaaggccaattgttcaagattcattcaacaattgaaacatctcccatgattaaatcagtataaggttgctatggtcttgcttgacaaagtttttttttgagggaatttcaactaaatttttgagtgaaactatcaaatactgattttaaaaaatttttataaaaggaagcgcagagataaaaggccatctatgctacaaaagtacccaaaaatgtaatcctaaagtatgaattgcattttttttttgtttggacgaaaggaaaggagtattaccacaagaatgatatcatcttcatatttagatcttttttgggtaaagcttgagattctctaaatatagagaaatcagaagaaaaaaaaaccgtgttttggtggttttgatttctagcctccacaataactttgacggcgtcgacaagtctaacggacaccaagcagcgaaccaccagcgccgagccaagcgaagcagacggccgagacgttgacaccttcggcgcggcatctctcgagagttccgctccggcgctccacctccaccgctggcggtttcttattccgttccgttccgcctcctgctctgctcctctccacaccacacggcacgaaaccgttacggcaccggcagcacccagcacgggagaggggattcctttcccaccgttccttccctttccgccccgccgctataaatagccagccccatccccagcttttttccccaatctcatctcctctctcctgttgttcggagcacacgcacaatccgatcgatccccaaatccccttcgtctctcctcgcgagcctcgtggatcccagcttcaaggtacggcgatcgatcatcccccctccttctctctaccttcttttctctagactacatcggatggcgatccatggttagggcctgctagtttcccttcctgttttgtcgatggctgcgaggcacaatagatctgatggcgttatgacggctaacttgtcatgttgttgcgatttatagtccctttaggagatcagtttaatttctcggatggttcgagatcggtggtccatggttagtaccctaagatccgcgctgttagggttcgtagatggaggcgacctgttctgattgttaacttgtcagtacctgggaaatcctgggatggttctagctcgtccgcagatgagatcgatttcatgatcctctgtatcttgtttcgttgcctaggttccgtctaatctatccgtggtatgatgtagatgttttgatcgtgctaactacgtcttgtaaagttaattgtcaggtcataatttttagcatgcctttttttttgtttggttttgtctaattgggctgtcgttctagatcagagtagaagactgttccaaactacctgctggatttattgaacttggatctgtatgtgtgtcacatatcttcataaattcatgattaagatggattgaaatatcttttatctttttggtatggatagttctatatgttggtgtggctttgttagatgtatacatgcttagatacatgaagcaacgtgctgctactgtttagtaattgctgttcatttgtctaataaacagataaggatatgtatttatgttgctgttggttttgctggtactttgttggatacaaatgcttcaatacagaaaacagcatgctgctacgatttaccatttatctaatcttatcatatgtctaatctaataaacaaacatgcttttaaattatcttcatatgcttggatgatggcatacacagcggctatgtgtggttttttaaatacccagcatcatgggcatgcatgacactgctttaatatgctttttatttgcttgagactgtttcttttgtttatactgaccctttagttcggtgactcttctgcaggtcgactttaacttagcctaggatccatggcccagtccaagcacggcctgaccaaggagatgaccatgaagtaccgcatggagggctgcgtggacggccacaagttcgtgatcaccggcgagggcatcggctaccccttcaagggcaagcaggccatcaacctgtgcgtggtggagggcggccccttgcccttcgccgaggacatcttgtccgccgccttcatgtacggcaaccgcgtgttcaccgagtacccccaggacatcgtcgactacttcaagaactcctgccccgccggctacacctgggaccgctccttcctgttcgaggacggcgccgtgtgcatctgcaacgccgacatcaccgtgagcgtggaggagaactgcatgtaccacgagtccaagttctacggcgtgaacttccccgccgacggccccgtgatgaagaagatgaccgacaactgggagccctcctgcgagaagatcatccccgtgcccaagcagggcatcttgaagggcgacgtgagcatgtacctgctgctgaaggacggtggccgcttgcgctgccagttcgacaccgtgtacaaggccaagtccgtgccccgcaagatgcccgactggcacttcatccagcacaagctgacccgcgaggaccgcagcgacgccaagaaccagaagtggcacctgaccgagcacgccatcgcctccggctccgccttgccctccggactcagatctcgatagggtaccaatggccagttaacagatccagctgctgctgttctagggttcacaagtctgcctatttgtcttccccaatggagctatggttgtctggtctggtccttggtcgtgtcccgtttcattgtgtactatttacctgtaatgtgtatccttaagtctggtttgatggtgtctgaaacgttttgctgtggtagagcagcatggaagaactataatgaataagtgatccctaatcattgtgtccaaattttgcttctgctatacccttttgtgctgtttcttatgttttgcttaaaaatttgatctgacaaacaaatttgtctaaattatgctcttgttctgactgtgtactgtacacatttgtattgctaccggtttggcacatagttttctctttgattgcagatcaaacccttctgattgcagattgcttggctatggctgatgtgctcactgttcttctttagcttgtatattgctgatggtggcttggctacggctgaaaaagttgctgctgcgccgacttggcaactgttgctccagtaatgctttgtcctctcttcctagccgccgacttggcacttggcagctgttgctcctgtaatgcgttgttatctcttatctcttgagatgtactatgattttgaggctgtttgacttgtgccagattgccagtgctgatgctatattatctcaggtttttatgctagtatatgttttactgtgtgctgcctgtgtcgagttacgtaatctattgaaccgctatgcgtgttgatgccctgttgttgcttgccagattgatgcccctgttgcttgcagcttgcaagctgtagtgaaatcctaaaattcgaaaccaaatctattctgaacttttgaagatctgtgatgtccggaagaaaagattcaaacagataaacgggactctccagaatctataaaataaatgatcgacaaacgctttgctttggtaggcttcctagttagttagcggaccgaagcttcggtccgggcctgcggccgcagatatcagaacctgcgtctggacgcacaagtcatagcattatcggctaaaatttcttaatttctaaattagtcatatcggctaagaaagtggggagcactatcatttcgtagaacaagaacaaggtatcatatatatatatatatataatatttaaactttgttaagtggaatcaaagtgctagtattaatggagtttcatgtgcattaaattttatgtcacatcagcaattttgttgacttggcaaggtcatttagggtgtgtttggaagacaggggctattaggagtattaaacatagtctaattacaaaactaattgcacaaccgctaagctgaatcgcgagatggatctattaagcttaattagtccatgatttgacaatgtggtgctacaataaccatttgctaatgatggattacttaggtttaatagattcgtctcgtgatttagcctatgggttctgctattaattttgtaattagctcatatttagttcttataattagtatccgaacatccaatgtgacatgctaaagtttaaccctggtatccaaatgaagtcttatgagagtttcatcactccggtggtatatgtacttaggctccgttttcttccaccgacttatttttagcacccgtcacattgaatgtttagatactaattagaagtattaaacgtagactatttacaaaatccattacataagacgaatctaaacggcgagacgaatctattaaacctaattagtccatgatttgacaatgtgttgctacagtaaacatttgctaatgatggattaattaggcttaatagattcgtctcgccgtttagcctccacttatgtaatgggttttctaaacaatctacgtttaatactcctaattagtatctaaatattcaatgtgacacgtgctaaaaataagtcagtggaaggaagagaacgtccccttagttttccatcttattaattgtacgatgaaactgtgcagccagatgattgacaatcgcaatacttcaactagtgggccatgcacatcagcgacgtgtaacgtcgtgagttgctgttcccgtagagaaatatcaactggtgggccacgcacatcagcgtcgtgtaacgtggacggaggagccccgtgacggcgtcgacatcgaacggccaccaaccacggaaccacccgtccccacctctcggaagctccgctccacggcgtcgacatctaacggctaccagcaggcgtacgggttggagtggactccttgcctctttgcgctggcggcttccggaaattgcgtggcggagacgaggcgggctcgtctcacacggcacggaagacgtcacgggttccttccccacctctcctcttccccaccgccataaatagccgaccccctcgcctttctccccaatctcatctcgtctcgtgttgttcggagcacaccacccgccccaaatcgttcttcccgcaagcctcggcgatccttcacccgcttcaaggtacggcgatcgtcttcctcctctagatcggcgtgatctgcaagtagttgatttggtagatggttaggatctgtgcactgaagaaatcatgttagatccgcgatgtttctgttcgtagatggctgggaggtggaatttttgtgtagatctgatatgttctcctgtttatcttgtcacgctcctgcgatttgtggggattttaggtcgttgatctgggaatcgtggggttgcttctaggctgttcgtagatgaggtcgttctcacggtttactggatcattgcctagtagatcagctcgggctttcgtctttgtatatggtgcccatacttgcatctatgatctggttccgtggtgttacctaggtttctgcgcctgattcgtccgatcgattttgttagcatgtggtaaacgtttggtcatggtctgatttagattagagtcgaataggatgatctcgatctagctcttgggattaatatgcatgtgtcaccaatctgttccgtggttaagatgatgaatctatgcttagttaatgggtgtagatatatatgctgctgttcctcaatgatgccgtagcttttacctgagcagcatggatcgtcctgttacttaggtagatgcacatgcttatagatcaagatatgtactgctactgttggaattctttagtatacctgatgatcatccatgctcttgttacttgttttggtatacttggatgatggcatgctgctgctttttgttgatttgagcccatccatatctgcatatgtcacatgattaagatgattacgctgtttctgtatgatgccatagcttttatgtgagcaacatgcatcctcctggttatatgcattaatagatggaagatatctattgctacaatttgatgattattttgtacatacgatgatcaagcatgctcttcatactttgttgatatacttggataatgaaatgctgctgcacgttcattctatagcactaatgatgtgatgaacacgcacgacctgtttgtggcatctgtttgaatgtgttgttgctgttcactagagactgttttattaacctactgctagatacttacccttctgtctgtttattcttttgcagccagaatagcggatccgcccatggtcgaacaggacggcctgcatgcaggatcaccagcggcctgggtcgaaagactcttcggctacgactgggcacaacagaccatcgggtgtagcgacgcagctgttttcaggctgtccgcacagggcagacccgttttgttcgtcaaaacagacctgtctggcgcgctcaacgaactgcaagacgaggccgcaagactgagctggcttgctaccacaggcgttccttgtgctgcagtcctcgacgtcgttactgaggctggaagagactggctgctcctgggtgaagtcccaggacaggaccttttgtccagccatctggcacctgccgaaaaggtcagcatcatggcagacgccatgagaaggctgcacacactcgaccctgcaacatgccccttcgatcaccaggcaaaacacaggatcgagcgcgcaagaacgcgcatggaggctggtttggtcgaccaagatgacctcgacgaggaacaccaaggactggctcctgctgaactcttcgccagactcaaggcgagaatgccagacggtgacgacctggtcgtcacacacggcgacgcttgtctcccaaacataatggtcgagaacggacgcttcagcggtttcatcgactgcggtagactcggagtcgctgacagataccaggacatcgccctggcaacacgcgacatcgcagaggaactcggaggcgaatgggctgacaggtttctcgtgctctacggtatcgctgctccagacagccagaggatcgcattctacaggctcctcgacgagttcttttagttcgaacggtacccggggatcctctagtgccgtgggtcgtttaagctgccgctgtacctgtgtcgtctggtgccttctggtgtacctgggaggttgtcgtctatcaagtatctgtggttggtgtcatgagtcagtgagtcccaatactgttcgtgtcctgtgtgcattatacccaaaactgttatgggcaaatcatgaataagcttgatgttcgaacttaaaagtctctgctcaatatggtattatggttgtttttgttcgtctcctaatatttgcctgggatcaaattttattggctggtgttcatttgacctccatgttcttgctaggctccattttttactctacagccataatatgtttgattgtttggtttgttctttgttgtacacctggttctgtcgagcttagttttcgacactggcttacagcttaacatgttgctattttattgggttctgattgctattttattgggttctgattgctagtttttgctgaatccaaaaaccatgttatttatttaagcgatccaggttattattatgatggtggctaagtttttttttttccaagggtaaattttctggattctccagtgtttctgtggccgaattcaatcactagagtcgacctgcatgattccgatgacttcgtaggttcctagctcaagccgctcgtgtccaagcgtcacttacgattagctaatgattacggcatctaggaccgactagctagctagctaagagctcggtaccgagctcgaattcattccgattaatcgtggcctcttgctcttcaggatgaagagctatgtttaaacgtgcaagcgctactagacaattcagtacattaaaaacgtccgcaatgtgttattaagttgtctaagcgtcaatttgtttacaccacaatatatcctgcca

SEQ ID NO: 342 - DNA, 21096 bp, Artificial Sequence
  PHV00002
gtttacccgccaatatatcctgtcaaacactgcggccgcacttgaccgcggatggagccggagctgtggtgaggccatcgacgggaggtgggggagaacacagtctcagtgttctttgtgagtccgcaaggtttttagcttttctgtattaattaaggttgctgttggctgtagaatacggtcgtggaagagctgtatcggtagctactacgtaagctattatatactggaagtctggagctcgtcgatctccggtcgtcttcctccatttctcctcgtcttgctttgactgctgctaccatttgcttctgttttctgatgaagcatgccatgtcggccaccagtgtttgtgtggtttttgcagggaatggctttcaagtgctgtgattgaatggccctcgtcgtcctcggctgagctcacatggacgcgtcatgtgagtgagatatatgatcatatgatgagtggggttcgggtgagtgcgtacttgaagtaggatcccgctttcactcattcattcattggcctttaaaccgggaaattttcgcgaggagatggagggaagcaagcagggtgacgagtgcagagtgccgcgagcgctttgtcaaaaggcaccgccgtaggcaaaaaaatcaatggccctgactgactcgatggtagtactactgtagagactagagagggttgctccccatatcttcgtgtgacttttactccagcattgcatttccgtcattgagacgttaattaatagcagctttcgggacagatgactgtggccatgtttcgtcacggccgcttcgtgccagctgggggtactatagtactgtgattttgttagtaaaaactttcattaggccaccattgacgaccgggccttcgcttttgctgcgctaattaaccatttcccggcgaccgaagggaacatgaacatgccccgacacatgagggcatgaggactagtgttctccctgtcgttcgttgacttgactagtgatagtttaaacgctcttcaactggaagagcggttactaccggttcactagctagctgctaatcgagctagttaccctatgaggtgacatgaagcgctcacggttactatgacggttagcttcacgactgttggtggcagtagcgtacgacttagctatagttccggacttacctagctaataacttcgtatagcatacattatacgaagttatggttaccgagctgtctggtaattattggctgtaggattctaaacagagcctaaatagctggaatagctctagccctcaatccaaactaatgatatctatacttatgcaactctaaatttttattctaaaagtaatatttcatttttgtcaacgagattctctactctattccacaatcttttgaagctatatttaccttaaatctgtactctataccaataatcatatattctattatttatttttatctctctcctaaggagcatccctctatgtctgcatggcccccgcctcgggtcccaatctcttgctctgctagtagcacagaagaaaacactagaaatgacttgcttgacttagagtatcagataaacatcatgtttacttaactttaatttgtatcggtttctactatttttataatatttttgtctctatagatactacgtgcaacagtataatcaacctagtttaatccagagcgaaggattttttactaagtacgtgactccatatgcacagcgttccttttatggttcctcactgggcacagcataaacgaaccctgtccaatgttttcagcgcgaacaaacagaaattccatcagcgaacaaacaacatacatgcgagatgaaaataaataataaaaaaagctccgtctcgataggccggcacgaatcgagagcctccatagccagttttttccatcggaacggcggttcgcgcacctaattatatgcaccacacgcctataaagccaaccaacccgtcggaggggcgcaagccagacagaagacagcccgtcagcccctctcgtttttcatccgccttcgcctccaaccgcgtgcgctccacgcctcctccaggaaagcgagaggtacggcgatcgatcatcccccctccttctctctaccttcttttctctagactacatcggatggcgatccttggttagggcctgctagtttcccttcctgttttgtcgatggctgcgaggcacaatagatctgatggcgttatgacggctaacttgtcatgttgttgcgatttatagtccctttaggagatcagtttaatttctcggatggttcgagatcggtggtccttggttagtaccctaagatccgcgctgttagggttcgtagatggaggcgacctgttctgattcttaacttgtcagtacctgggaaatcctgggatggttctagctcgtccgcagatgagatcgatttcatgatcctctgtatcttgtttcgttgcctaggttccgtctaatctatccgtggtatgatgtagatgttttgatcgtgctaactacgtcttgtaaagttaattgtcaggtcataatttttagcatgcctttttttttgtttggttttgtctaattgggctgtcgttctagatcagagtagaagactgttccaaactacctgctggatttattgaacttggatctgtatgtgtgtcacatatcttcataaattcatgattaagatggattgaaatatcttttatctttttggtatggatagttctatatgttggtgtggctttgttagatgtatacatgcttagatacatgaagcaacgtgctgctactgtttagtaattgctgttcatttgtctaataaacagataaggatatgtatttatgttgctgttggttttgctggtactttgttggatacaaatgcttcaatacagaaaacagcatgctgctacgatttaccatttatctaatcttatcatatgtctaatctaataaacaaacatgcttttaaattatcttcatatgcttggatgatggcatacacagcggctatgtgtggttttttaaatacccagcatcatgggcatgcatgacactgctttaatatgctttttatttgcttgagactgtttcttttgtttatactgaccctttagttcggtgactcttctgcaggtccactttaacttagccttggagccatgaaagcgctcaccgcccgccaacaggaggtcttcgacctgatcagggatcacatctcccagacaggcatgccaccaacaagggcggaaatcgcacagaggctcgggtttcgctcgccaaacgctgccgaggagcaccttaaggcgctcgcgcgcaaaggcgttatcgagattgtgagcggagccagccgcggaatcaggctcttacaggaggaggaagagggacttccacttgtgggcagagtggccgctgacgaaccactccttgcccagcagcacatcgaaggacactaccaggtcgacccatccctgttcaagccaaacgccgatttcctcctccgcgtgtccgggatggcgatgaaagacatcggcatcatggacggcgacctgctggccgtccataaaactcaggacgtgcgcaacggccaggtggtggtggcccgcatcgacgatgaggtcacggtgaaacgcctcaagaagcagggcaataaagtggagctcctccccgaaaatagcgagttcaaaccaatcgtggtcgaccttcggcaacagtctttcacgattgagggcctggcggtgggcgttatcaggaacggcgattggcttggaggatccagctccccgccacccccgccaccgccaccgcccccgacctgcgccaaggacatccagaaagcagccgccgaagcggccctcgccttccaagacgagacgtgcgatacaaccaccacgaatcatggcctcgatatggaggaaacgatggtcgaagccatctacaccccagagcagtcagaaggcgccttctacatggacgaggaaaccatgttcggcatgccgaccctcctcgacaacatggccgaaggaatgctcctcccacctccctcagttcagtggaaccacaactacgacggcgaaggcgacggagacgtttccctgtggagctactagctcgaggtttttctcagacagttttctaaaaaaagggcgtttctggggaagttcgagatggttcgtaaggtgttactggctcctgtgaaccaatacatgatactgccatgataagggttataattagtcaagcagagtaagaagaaacaacagtagcagtgactccgattcctgaagatgagtcatatttgtcttgtgctcctgctgtatgaaatggatcgcatgtgtatattcgtcgccgcgccgcactggtgtaacctgttgcctcagagtttgcttttagctggttctgttttaaaaataagtactgttttttggttggctgcaagccattctgaacttcagtttaccaattgtttttatgttgtggttgaatattttaattttttatttaatgtttggttctttttttatatatatttgcaaaaatgatacaagtggtcaagttttcatatagtatgggctctatttcctagagctctacctctaggaacgaattttgtggaggttttcttttggctagttaggcaaagtccccatatcttgcaggctaaatcaagaagaagctctgtcaaacagttttttttactgaaaagtgattaaagagtagtttctcctagatcacttcagagtttatcctagagaatcatgggaatcaaattcagttagaggatcatttcttacaaagaatcaactttcgtagagaatctaaagcagaaagagctttgacaaacttacccttagagcaattccaacattctcgcgtgagtttcttcgcgccgttgttttgcggtgacttcatctggacgtcccgcgacatagagacgcttgtattgatcatgagagcttgtgtggtcatacacaatataattgttaaagatgaaagagatgtggaccttaatgagcgattcgactttgatggtgaaaatgtgcaaccttctcatggtatttctactcgcacactagctgaatttattgaagctcataaaaagatccgagacaaagaaatacattttcaattgaaagaagacctaatcaagcacttatggtgtacacccgggaagcttggcgcgccggtcacccggtccgggcctagaaggccacccgggccccgtccactaactaatcgttaagcgggtttcccgttagctaagcactaggccggaatccccaagtttgtacaaaaaagcaggctccggccagaatggcccggaccgggttaccgaattgctaactaactagaattctgtacaaccggtctaactaactagcaattcgcccttgatactgtatatactcacagtatcatatgatactgtatatactcacagtatcatatgatactgtatatactcacagtataagggcgaattggcccttgatactgtatatactcacagtatcatatgatactgtatatactcacagtatcatatgatactgtatatactcacagtataagggcgaattgctgcagcccgggacaatcccactatccttcgcaagacccttcctctatataaggaagttcatttcatttggagaggactatttttacaacaattttacaattacaccggtaatggccactgtgaacaactggctcgctttctccctctccccgcaggagctgccgccctcccagacgacggactccacactcatctcggccgccaccgccgaccatgtctccggcgatgtctgcttcaacatcccccaagattggagcatgaggggatcagagctttcggcgctcgtcgcggagccgaagctggaggacttcctcggcggcatctccttctccgagcagcatcacaaggccaactgcaacatgatacccagcactagcagcacagtttgctacgcgagctcaggtgctagcaccggctaccatcaccagctgtaccaccagcccaccagctcagcgctccacttcgcggactccgtaatggtggcttcctcggccggtgtccacgacggcggtgccatgctcagcgcggccgccgctaacggtgtcgctggcgctgccagtgccaacggcggcggcatcgggctgtccatgattaagaactggctgcggagccaaccggcgcccatgcagccgagggtggcggcggctgagggcgcgcaggggctctctttgtccatgaacatggcggggacgacccaaggcgctgctggcatgccacttctcgctggagagcgcgcacgggcgcccgagagtgtatcgacgtcagcacagggtggagccgtcgtcgtcacggcgccgaaggaggatagcggtggcagcggtgttgccggcgctctagtagccgtgagcacggacacgggtggcagcggcggcgcgtcggctgacaacacggcaaggaagacggtggacacgttcgggcagcgcacgtcgatttaccgtggcgtgacaaggcatagatggactgggagatatgaggcacatctttgggataacagttgcagaagggaagggcaaactcgtaagggtcgtcaagtctatttaggtggctatgataaagaggagaaagctgctagggcttatgatcttgctgctctgaagtactggggtgccacaacaacaacaaattttccagtgagtaactacgaaaaggagctcgaggacatgaagcacatgacaaggcaggagtttgtagcgtctctgagaaggaagagcagtggtttctccagaggtgcatccatttacaggggagtgactaggcatcaccaacatggaagatggcaagcacggattggacgagttgcagggaacaaggatctttacttgggcaccttcagcacccaggaggaggcagcggaggcgtacgacatcgcggcgatcaagttccgcggcctcaacgccgtcaccaacttcgacatgagccgctacgacgtgaagagcatcctggacagcagcgccctccccatcggcagcgccgccaagcgcctcaaggaggccgaggccgcagcgtccgcgcagcaccaccacgccggcgtggtgagctacgacgtcggccgcatcgcctcgcagctcggcgacggcggagccctggcggcggcgtacggcgcgcactaccacggcgccgcctggccgaccatcgcgttccagccgggcgccgccagcacaggcctgtaccacccgtacgcgcagcagccaatgcgcggcggcgggtggtgcaagcaggagcaggaccacgcggtgatcgcggccgcgcacagcctgcaggacctccaccacctgaacctgggcgcggccggcgcgcacgactttttctcggcagggcagcaggccgccgccgctgcgatgcacggcctgggtagcatcgacagtgcgtcgctcgagcacagcaccggctccaactccgtcgtctacaacggcggggtcggcgacagcaacggcgccagcgccgtcggcggcagtggcggtggctacatgatgccgatgagcgctgccggagcaaccactacatcggcaatggtgagccacgagcaggtgcatgcacgggcctacgacgaagccaagcaggctgctcagatggggtacgagagctacctggtgaacgcggagaacaatggtggcggaaggatgtctgcatgggggactgtcgtgtctgcagccgcggcggcagcagcaagcagcaacgacaacatggccgccgacgtcgggcatggcggcgcgcagctcttcagtgtctggaacgacacttaaccgttaacagctgctgctgttctagggttcacaagtctgcctatttgtcttccccaatggagctatggttgtctggtctggtccttggtcgtgtcccgtttcattgtgtactatttacctgtaatgtgtatccttaagtctggtttgatggtgtctgaaacgttttgctgtggtagagcagcatggaagaactataatgaataagtgatccctaatcattgtgtccaaattttgcttctgctatacccttttgtgctgtttcttatgttttgcttaaaaatttgatctgacaaacaaatttgtctaaattatgctcttgttctgactgtgtactgtacacatttgtattgctaccggtttggcacatagttttctctttgattgcagatcaaacccttctgattgcagattgcttggctatggctgatgtgctcactgttcttctttagcttgtatattgctgatggtggcttggctacggctgaaaaagttgctgctgcgccgacttggcaactgttgctccagtaatgctttgtcctctcttcctagccgccgacttggcacttggcagctgttgctcctgtaatgcgttgttatctcttatctcttgagatgtactatgattttgaggctgtttgacttgtgccagattgccagtgctgatgctatattatctcaggtttttatgctagtatatgttttactgtgtgctgcctgtgtcgagttacgtaatctattgaaccgctatgcgtgttgatgccctgttgttgcttgccagattgatgcccctgttgcttgcagcttgcaagctgtagtgaaatcctaaaattccaaaccaaatctattctgaacttttgaagatctgtgatgtccggaagaaaagattcaaacagataaacgggactctccagaatctataaaataaatgatcgacaaacgctttgctttggtaggcttcggcgcgccggtcacccggtccgggcctagaaggccacccggggcacttaggagcgaagactaacggttagctagggctgatacctaaaccttagtcactagcagcgtctactagctaccaagcggccgcacgtcacggtcactacgaatcgaccgaagcttgcatgggccgcggcgcgccgcgacttattgaactagtctagggcgcggctaacaacctagcttagattgccttgtctaaacccttaggctaacgcgccactctagaaggccgatctcccccgaacgcgccagatccgatatcgatgggccctggccgaagcttggtcacccgcaccttgctagttggatattacctcttctcttcaaagtatccttgaacgctcaccggttatcaaatctctacactatagctctgtagtcttgctagatagttagttctttagctctctctagaggttcacaaactcaatacaacacacagtggagtagggtattacgctccggcggcccgaaccactctaaatccttgtgtcctcgtgtgctcttccaccattaatgactgtaattgcagggacacgaagagttgtagcgcttttgccaacaagatccgctatatgctagtagagtggaacctgcacagcaacaagcatccaataatctgagaataagaattatgtgtggtgatggttctcatctctgcaactcgccattttcgcgagagaaccaaatccaagttggtgaagatcatgatttgggctcatgggctggcatagtagctattacctttgcaattgtggttcgaatctatccgatattctccttttcagggagagctaatgcttatgcttattgggtattttggtttgacactgcttcacgcccaaaaaaaggcaactatgtctgagttggatatggcccaaaaaaaggcagctatgtctgagttggatatggaagtcttctttcgtttagggtgaagtaagaccaagctcatgagcttattatcttaggtcggaacaaattagttgataggcatggcacatttatcaaattataatgattttaacagaaaagcaacacctctttttcagcagcaccagctttgcaagctgcaattgacactccaagcatagtatttgctccaaactcagcctgcatttcgcacaatatcatatctatttccatttggataaaatatattttccagaaatatgggaacagaatcaagatacagaaaaaagttgtggtagtagtggtaagtggaaacacaagtacagtgaaaagatagcattatttctgaacagtcaaattaaccgaaataagtagtatcacatactgcccctaaattgactacacccaatgtaaagaattgcttgagcatattgagccatcagttgtttgtttgtgtaacggatttgacaatgcagagttcaggagcaaaaaaccgcaaaggagagaaagagggaaaggatctcctagtatcccaccttgtggcgcgccctgtcaagtgcatgatggcctggtcgatctgcgtctgctgctgcggttccatcccaacgagtgcctccgacaccttgtcgttgatcacccgcaccgcgtaggcgacccccctggcgaggaacttccgcctctcggaggccccggccgcgtcggcggcggcgccctcgagcgcgcccacgctagccgtagatgctcggtgcacggccttgttggtgtgcaactcgacctcaacggccggtgcgctacgcccgtcaaggatctggcgcgcccgcaccctcgtgatcacggtgggcgcctcccgcctcatgtggccgacgatgaaaagcgccgggttaggggccttggcgcgcaccgccgtattcagggcctcctcgctcttgcgcgagagcaggtgcttccccaggtactcctgcactgacaaggctgccacagcggtggaatttgtcctcacgacttcgccacgtcgtcctcacctccctggcttcccacgactccgccgtatcgaggtgctcggtgggtcgtcttaatccgaagtccgaactaggaagacgagacagagaggtctgaggaatgggcctcgtttgatgttgagctgaattatttttccagcataagcccaggtcttggtccatgaacaaaattactagaaacccagcccagtactacgatctaaaagagggactgccactggatagctctctctagcattctccacgctccaatacagcggcgtcgtgtctatccgggtctatccgcgaacacgtgagaactctccagaaactgctttctcctccacttcatctctctcgctttccctctataaaaagaccccttctaggaattgagggagacagcaagcaccaagcagcgatccgaagctcaatcaattcactcaaacctcttccccaaatcttcgattagatcttcgttgacaagaagactagaaccgaacctgacatgtccaacctgctcacggttcaccagaaccttccggctcttccagtggacgcgacgtccgatgaagtcaggaagaacctcatggacatgttccgcgacaggcaagcgttcagcgagcacacctggaagatgctgctctccgtctgccgctcctgggctgcatggtgcaagctgaacaacaggaagtggttccccgctgagcccgaggacgtgagggattaccttctgtacctgcaagcgcgaggtttgtttctgcttctacctttgatatatatataataattatcattaattagtagtaatataatatttcaaatatttttttcaaaataaaagaatgtagtatatagcaattgcttttctgtagtttataagtgtgtatattttaatttataacttttctaatatatgaccaaaacatggtgatgcctaggtctggcagtgaagaccatccagcaacaccttggacaactgaacatgcttcacaggcgctccggcctcccgcgccccagcgactcgaacgccgtgagcctcgtcatgcgccgcatcaggaaggaaaacgtcgatgccggcgaaagggcaaagcaggccctcgcgttcgagaggaccgatttcgaccaggtccgcagcctgatggagaacagcgacaggtgccaggacattaggaacctggcgttcctcggaattgcatacaacacgctcctcaggatcgcggaaattgcccgcattcgcgtgaaggacattagccgcaccgacggcggcaggatgcttatccacattggcaggaccaagacgctcgtttccaccgcaggcgtcgaaaaggccctcagcctcggagtgaccaagctcgtcgaacgctggatctccgtgtccggcgtcgcggacgacccaaacaactacctcttctgccgcgtccgcaagaacggggtggctgcccctagcgccaccagccaactcagcacgagggccttggaaggtattttcgaggccacccaccgcctgatctacggcgcgaaggatgacagcggtcaacgctacctcgcatggtccgggcactccgcccgcgttggagctgctagggacatggcccgcgccggtgtttccatccccgaaatcatgcaggcgggtggatggacgaacgtgaacattgtcatgaactacattcgcaaccttgacagcgagacgggcgcaatggttcgcctcctggaagatggtgactgaggtacccaacctagacttgtccatcttctggattggccaacttaattaatgtatgaaataaaaggatgcacacatagtgacatgctaatcactataatgtgggcatcaaagttgtgtgttatgtgtaattactagttatctgaataaaagagaaagagatcatccatatttcttatcctaaatgaatgtcacgtgtctttataattctttgatgaaccagatgcatttcattaaccaaatccatatacatataaatattaatcatatataattaatatcaattgggttagcaaaacaaatctagtctaggtgtgttttgcgatccgatatcgacgtctaaaaacggcccctaactaacgcttagttgcccgctagattagtcccccgttagtgcctagttagacacacgacgaactaggggctagtgccaccttgctagttggatattacctcttctcttcaaagtatccttgaacgctcaccggttatcaaatctctacactatagctctgtagtcttgctagatagttagttctttagctctcgcacgataacttcgtatagcatacattatacgaagttataacagcggaccgggttaccgaattcctgcccttaaggccaattgttcaagattcattcaacaattgaaacatctcccatgattaaatcagtataaggttgctatggtcttgcttgacaaagtttttttttgagggaatttcaactaaatttttgagtgaaactatcaaatactgattttaaaaaatttttataaaaggaagcgcagagataaaaggccatctatgctacaaaagtacccaaaaatgtaatcctaaagtatgaattgcattttttttttgtttggacgaaaggaaaggagtattaccacaagaatgatatcatcttcatatttagatcttttttgggtaaagcttgagattctctaaatatagagaaatcagaagaaaaaaaaaccgtgttttggtggttttgatttctagcctccacaataactttgacggcgtcgacaagtctaacggacaccaagcagcgaaccaccagcgccgagccaagcgaagcagacggccgagacgttgacaccttcggcgcggcatctctcgagagttccgctccggcgctccacctccaccgctggcggtttcttattccgttccgttccgcctcctgctctgctcctctccacaccacacggcacgaaaccgttacggcaccggcagcacccagcacgggagaggggattcctttcccaccgttccttccctttccgccccgccgctataaatagccagccccatccccagcttttttccccaatctcatctcctctctcctgttgttcggagcacacgcacaatccgatcgatccccaaatccccttcgtctctcctcgcgagcctcgtggatcccagcttcaaggtacggcgatcgatcatcccccctccttctctctaccttcttttctctagactacatcggatggcgatccatggttagggcctgctagtttcccttcctgttttgtcgatggctgcgaggcacaatagatctgatggcgttatgacggctaacttgtcatgttgttgcgatttatagtccctttaggagatcagtttaatttctcggatggttcgagatcggtggtccatggttagtaccctaagatccgcgctgttagggttcgtagatggaggcgacctgttctgattgttaacttgtcagtacctgggaaatcctgggatggttctagctcgtccgcagatgagatcgatttcatgatcctctgtatcttgtttcgttgcctaggttccgtctaatctatccgtggtatgatgtagatgttttgatcgtgctaactacgtcttgtaaagttaattgtcaggtcataatttttagcatgcctttttttttgtttggttttgtctaattgggctgtcgttctagatcagagtagaagactgttccaaactacctgctggatttattgaacttggatctgtatgtgtgtcacatatcttcataaattcatgattaagatggattgaaatatcttttatctttttggtatggatagttctatatgttggtgtggctttgttagatgtatacatgcttagatacatgaagcaacgtgctgctactgtttagtaattgctgttcatttgtctaataaacagataaggatatgtatttatgttgctgttggttttgctggtactttgttggatacaaatgcttcaatacagaaaacagcatgctgctacgatttaccatttatctaatcttatcatatgtctaatctaataaacaaacatgcttttaaattatcttcatatgcttggatgatggcatacacagcggctatgtgtggttttttaaatacccagcatcatgggcatgcatgacactgctttaatatgctttttatttgcttgagactgtttcttttgtttatactgaccctttagttcggtgactcttctgcaggtcgactttaacttagcctaggatccatggcccagtccaagcacggcctgaccaaggagatgaccatgaagtaccgcatggagggctgcgtggacggccacaagttcgtgatcaccggcgagggcatcggctaccccttcaagggcaagcaggccatcaacctgtgcgtggtggagggcggccccttgcccttcgccgaggacatcttgtccgccgccttcatgtacggcaaccgcgtgttcaccgagtacccccaggacatcgtcgactacttcaagaactcctgccccgccggctacacctgggaccgctccttcctgttcgaggacggcgccgtgtgcatctgcaacgccgacatcaccgtgagcgtggaggagaactgcatgtaccacgagtccaagttctacggcgtgaacttccccgccgacggccccgtgatgaagaagatgaccgacaactgggagccctcctgcgagaagatcatccccgtgcccaagcagggcatcttgaagggcgacgtgagcatgtacctgctgctgaaggacggtggccgcttgcgctgccagttcgacaccgtgtacaaggccaagtccgtgccccgcaagatgcccgactggcacttcatccagcacaagctgacccgcgaggaccgcagcgacgccaagaaccagaagtggcacctgaccgagcacgccatcgcctccggctccgccttgccctccggactcagatctcgatagggtaccaatggccagttaacagatccagctgctgctgttctagggttcacaagtctgcctatttgtcttccccaatggagctatggttgtctggtctggtccttggtcgtgtcccgtttcattgtgtactatttacctgtaatgtgtatccttaagtctggtttgatggtgtctgaaacgttttgctgtggtagagcagcatggaagaactataatgaataagtgatccctaatcattgtgtccaaattttgcttctgctatacccttttgtgctgtttcttatgttttgcttaaaaatttgatctgacaaacaaatttgtctaaattatgctcttgttctgactgtgtactgtacacatttgtattgctaccggtttggcacatagttttctctttgattgcagatcaaacccttctgattgcagattgcttggctatggctgatgtgctcactgttcttctttagcttgtatattgctgatggtggcttggctacggctgaaaaagttgctgctgcgccgacttggcaactgttgctccagtaatgctttgtcctctcttcctagccgccgacttggcacttggcagctgttgctcctgtaatgcgttgttatctcttatctcttgagatgtactatgattttgaggctgtttgacttgtgccagattgccagtgctgatgctatattatctcaggtttttatgctagtatatgttttactgtgtgctgcctgtgtcgagttacgtaatctattgaaccgctatgcgtgttgatgccctgttgttgcttgccagattgatgcccctgttgcttgcagcttgcaagctgtagtgaaatcctaaaattcgaaaccaaatctattctgaacttttgaagatctgtgatgtccggaagaaaagattcaaacagataaacgggactctccagaatctataaaataaatgatcgacaaacgctttgctttggtaggcttcctagttagttagcggaccgaagcttcggtccgggcctgcggccgcagatatcagaacctgcgtctggacgcacaagtcatagcattatcggctaaaatttcttaatttctaaattagtcatatcggctaagaaagtggggagcactatcatttcgtagaacaagaacaaggtatcatatatatatatatatataatatttaaactttgttaagtggaatcaaagtgctagtattaatggagtttcatgtgcattaaattttatgtcacatcagcaattttgttgacttggcaaggtcatttagggtgtgtttggaagacaggggctattaggagtattaaacatagtctaattacaaaactaattgcacaaccgctaagctgaatcgcgagatggatctattaagcttaattagtccatgatttgacaatgtggtgctacaataaccatttgctaatgatggattacttaggtttaatagattcgtctcgtgatttagcctatgggttctgctattaattttgtaattagctcatatttagttcttataattagtatccgaacatccaatgtgacatgctaaagtttaaccctggtatccaaatgaagtcttatgagagtttcatcactccggtggtatatgtacttaggctccgttttcttccaccgacttatttttagcacccgtcacattgaatgtttagatactaattagaagtattaaacgtagactatttacaaaatccattacataagacgaatctaaacggcgagacgaatctattaaacctaattagtccatgatttgacaatgtgttgctacagtaaacatttgctaatgatggattaattaggcttaatagattcgtctcgccgtttagcctccacttatgtaatgggttttctaaacaatctacgtttaatactcctaattagtatctaaatattcaatgtgacacgtgctaaaaataagtcagtggaaggaagagaacgtccccttagttttccatcttattaattgtacgatgaaactgtgcagccagatgattgacaatcgcaatacttcaactagtgggccatgcacatcagcgacgtgtaacgtcgtgagttgctgttcccgtagagaaatatcaactggtgggccacgcacatcagcgtcgtgtaacgtggacggaggagccccgtgacggcgtcgacatcgaacggccaccaaccacggaaccacccgtccccacctctcggaagctccgctccacggcgtcgacatctaacggctaccagcaggcgtacgggttggagtggactccttgcctctttgcgctggcggcttccggaaattgcgtggcggagacgaggcgggctcgtctcacacggcacggaagacgtcacgggttccttccccacctctcctcttccccaccgccataaatagccgaccccctcgcctttctccccaatctcatctcgtctcgtgttgttcggagcacaccacccgccccaaatcgttcttcccgcaagcctcggcgatccttcacccgcttcaaggtacggcgatcgtcttcctcctctagatcggcgtgatctgcaagtagttgatttggtagatggttaggatctgtgcactgaagaaatcatgttagatccgcgatgtttctgttcgtagatggctgggaggtggaatttttgtgtagatctgatatgttctcctgtttatcttgtcacgctcctgcgatttgtggggattttaggtcgttgatctgggaatcgtggggttgcttctaggctgttcgtagatgaggtcgttctcacggtttactggatcattgcctagtagatcagctcgggctttcgtctttgtatatggtgcccatacttgcatctatgatctggttccgtggtgttacctaggtttctgcgcctgattcgtccgatcgattttgttagcatgtggtaaacgtttggtcatggtctgatttagattagagtcgaataggatgatctcgatctagctcttgggattaatatgcatgtgtcaccaatctgttccgtggttaagatgatgaatctatgcttagttaatgggtgtagatatatatgctgctgttcctcaatgatgccgtagcttttacctgagcagcatggatcgtcctgttacttaggtagatgcacatgcttatagatcaagatatgtactgctactgttggaattctttagtatacctgatgatcatccatgctcttgttacttgttttggtatacttggatgatggcatgctgctgctttttgttgatttgagcccatccatatctgcatatgtcacatgattaagatgattacgctgtttctgtatgatgccatagcttttatgtgagcaacatgcatcctcctggttatatgcattaatagatggaagatatctattgctacaatttgatgattattttgtacatacgatgatcaagcatgctcttcatactttgttgatatacttggataatgaaatgctgctgcacgttcattctatagcactaatgatgtgatgaacacgcacgacctgtttgtggcatctgtttgaatgtgttgttgctgttcactagagactgttttattaacctactgctagatacttacccttctgtctgtttattcttttgcagccagaatagcggatccgcccatggtcgaacaggacggcctgcatgcaggatcaccagcggcctgggtcgaaagactcttcggctacgactgggcacaacagaccatcgggtgtagcgacgcagctgttttcaggctgtccgcacagggcagacccgttttgttcgtcaaaacagacctgtctggcgcgctcaacgaactgcaagacgaggccgcaagactgagctggcttgctaccacaggcgttccttgtgctgcagtcctcgacgtcgttactgaggctggaagagactggctgctcctgggtgaagtcccaggacaggaccttttgtccagccatctggcacctgccgaaaaggtcagcatcatggcagacgccatgagaaggctgcacacactcgaccctgcaacatgccccttcgatcaccaggcaaaacacaggatcgagcgcgcaagaacgcgcatggaggctggtttggtcgaccaagatgacctcgacgaggaacaccaaggactggctcctgctgaactcttcgccagactcaaggcgagaatgccagacggtgacgacctggtcgtcacacacggcgacgcttgtctcccaaacataatggtcgagaacggacgcttcagcggtttcatcgactgcggtagactcggagtcgctgacagataccaggacatcgccctggcaacacgcgacatcgcagaggaactcggaggcgaatgggctgacaggtttctcgtgctctacggtatcgctgctccagacagccagaggatcgcattctacaggctcctcgacgagttcttttagttcgaacggtacccggggatcctctagtgccgtgggtcgtttaagctgccgctgtacctgtgtcgtctggtgccttctggtgtacctgggaggttgtcgtctatcaagtatctgtggttggtgtcatgagtcagtgagtcccaatactgttcgtgtcctgtgtgcattatacccaaaactgttatgggcaaatcatgaataagcttgatgttcgaacttaaaagtctctgctcaatatggtattatggttgtttttgttcgtctcctaatatttgcctgggatcaaattttattggctggtgttcatttgacctccatgttcttgctaggctccattttttactctacagccataatatgtttgattgtttggtttgttctttgttgtacacctggttctgtcgagcttagttttcgacactggcttacagcttaacatgttgctattttattgggttctgattgctattttattgggttctgattgctagtttttgctgaatccaaaaaccatgttatttatttaagcgatccaggttattattatgatggtggctaagtttttttttttccaagggtaaattttctggattctccagtgtttctgtggccgaattcaatcactagagtcgacctgcatgattccgatgacttcgtaggttcctagctcaagccgctcgtgtccaagcgtcacttacgattagctaatgattacggcatctaggaccgactagctagctagctaagagctcggtaccgagctcgaattcattccgattaatcgtggcctcttgctcttcaggatgaagagctatgtttaaacgtgcaagcgctactagacaattcagtacattaaaaacgtccgcaatgtgttattaagttgtctaagcgtcaatttgtttacaccacaatatatcctgcca

SEQ ID NO: 343 - DNA, 21096 bp, Artificial Sequence; identical to SEQ ID NO: 342
  PHV00003

SEQ ID NO: 344 - DNA, 19872 bp, Artificial Sequence
  PHV00004
gtttacccgccaatatatcctgtcaaacactgcggccgcacttgaccgcggatggagccggagctgtggtgaggccatcgacgggaggtgggggagaacacagtctcagtgttctttgtgagtccgcaaggtttttagcttttctgtattaattaaggttgctgttggctgtagaatacggtcgtggaagagctgtatcggtagctactacgtaagctattatatactggaagtctggagctcgtcgatctccggtcgtcttcctccatttctcctcgtcttgctttgactgctgctaccatttgcttctgttttctgatgaagcatgccatgtcggccaccagtgtttgtgtggtttttgcagggaatggctttcaagtgctgtgattgaatggccctcgtcgtcctcggctgagctcacatggacgcgtcatgtgagtgagatatatgatcatatgatgagtggggttcgggtgagtgcgtacttgaagtaggatcccgctttcactcattcattcattggcctttaaaccgggaaattttcgcgaggagatggagggaagcaagcagggtgacgagtgcagagtgccgcgagcgctttgtcaaaaggcaccgccgtaggcaaaaaaatcaatggccctgactgactcgatggtagtactactgtagagactagagagggttgctccccatatcttcgtgtgacttttactccagcattgcatttccgtcattgagacgttaattaatagcagctttcgggacagatgactgtggccatgtttcgtcacggccgcttcgtgccagctgggggtactatagtactgtgattttgttagtaaaaactttcattaggccaccattgacgaccgggccttcgcttttgctgcgctaattaaccatttcccggcgaccgaagggaacatgaacatgccccgacacatgagggcatgaggactagtgttctccctgtcgttcgttgacttgactagtgatagtttaaacgctcttcaactggaagagcggttactaccggttcactagctagctgctaatcgagctagttaccctatgaggtgacatgaagcgctcacggttactatgacggttagcttcacgactgttggtggcagtagcgtacgacttagctatagttccggacttacctagctaataacttcgtatagcatacattatacgaagttatggttaccgagctgtctggtaattattggctgtaggattctaaacagagcctaaatagctggaatagctctagccctcaatccaaactaatgatatctatacttatgcaactctaaatttttattctaaaagtaatatttcatttttgtcaacgagattctctactctattccacaatcttttgaagctatatttaccttaaatctgtactctataccaataatcatatattctattatttatttttatctctctcctaaggagcatccctctatgtctgcatggcccccgcctcgggtcccaatctcttgctctgctagtagcacagaagaaaacactagaaatgacttgcttgacttagagtatcagataaacatcatgtttacttaactttaatttgtatcggtttctactatttttataatatttttgtctctatagatactacgtgcaacagtataatcaacctagtttaatccagagcgaaggattttttactaagtacgtgactccatatgcacagcgttccttttatggttcctcactgggcacagcataaacgaaccctgtccaatgttttcagcgcgaacaaacagaaattccatcagcgaacaaacaacatacatgcgagatgaaaataaataataaaaaaagctccgtctcgataggccggcacgaatcgagagcctccatagccagttttttccatcggaacggcggttcgcgcacctaattatatgcaccacacgcctataaagccaaccaacccgtcggaggggcgcaagccagacagaagacagcccgtcagcccctctcgtttttcatccgccttcgcctccaaccgcgtgcgctccacgcctcctccaggaaagcgagaggtacggcgatcgatcatcccccctccttctctctaccttcttttctctagactacatcggatggcgatccttggttagggcctgctagtttcccttcctgttttgtcgatggctgcgaggcacaatagatctgatggcgttatgacggctaacttgtcatgttgttgcgatttatagtccctttaggagatcagtttaatttctcggatggttcgagatcggtggtccttggttagtaccctaagatccgcgctgttagggttcgtagatggaggcgacctgttctgattcttaacttgtcagtacctgggaaatcctgggatggttctagctcgtccgcagatgagatcgatttcatgatcctctgtatcttgtttcgttgcctaggttccgtctaatctatccgtggtatgatgtagatgttttgatcgtgctaactacgtcttgtaaagttaattgtcaggtcataatttttagcatgcctttttttttgtttggttttgtctaattgggctgtcgttctagatcagagtagaagactgttccaaactacctgctggatttattgaacttggatctgtatgtgtgtcacatatcttcataaattcatgattaagatggattgaaatatcttttatctttttggtatggatagttctatatgttggtgtggctttgttagatgtatacatgcttagatacatgaagcaacgtgctgctactgtttagtaattgctgttcatttgtctaataaacagataaggatatgtatttatgttgctgttggttttgctggtactttgttggatacaaatgcttcaatacagaaaacagcatgctgctacgatttaccatttatctaatcttatcatatgtctaatctaataaacaaacatgcttttaaattatcttcatatgcttggatgatggcatacacagcggctatgtgtggttttttaaatacccagcatcatgggcatgcatgacactgctttaatatgctttttatttgcttgagactgtttcttttgtttatactgaccctttagttcggtgactcttctgcaggtccactttaacttagccttggagccatgaaagcgctcaccgcccgccaacaggaggtcttcgacctgatcagggatcacatctcccagacaggcatgccaccaacaagggcggaaatcgcacagaggctcgggtttcgctcgccaaacgctgccgaggagcaccttaaggcgctcgcgcgcaaaggcgttatcgagattgtgagcggagccagccgcggaatcaggctcttacaggaggaggaagagggacttccacttgtgggcagagtggccgctgacgaaccactccttgcccagcagcacatcgaaggacactaccaggtcgacccatccctgttcaagccaaacgccgatttcctcctccgcgtgtccgggatggcgatgaaagacatcggcatcatggacggcgacctgctggccgtccataaaactcaggacgtgcgcaacggccaggtggtggtggcccgcatcgacgatgaggtcacggtgaaacgcctcaagaagcagggcaataaagtggagctcctccccgaaaatagcgagttcaaaccaatcgtggtcgaccttcggcaacagtctttcacgattgagggcctggcggtgggcgttatcaggaacggcgattggcttggaggatccagctccccgccacccccgccaccgccaccgcccccgacctgcgccaaggacatccagaaagcagccgccgaagcggccctcgccttccaagacgagacgtgcgatacaaccaccacgaatcatggcctcgatatggaggaaacgatggtcgaagccatctacaccccagagcagtcagaaggcgccttctacatggacgaggaaaccatgttcggcatgccgaccctcctcgacaacatggccgaaggaatgctcctcccacctccctcagttcagtggaaccacaactacgacggcgaaggcgacggagacgtttccctgtggagctactagctcgaggtttttctcagacagttttctaaaaaaagggcgtttctggggaagttcgagatggttcgtaaggtgttactggctcctgtgaaccaatacatgatactgccatgataagggttataattagtcaagcagagtaagaagaaacaacagtagcagtgactccgattcctgaagatgagtcatatttgtcttgtgctcctgctgtatgaaatggatcgcatgtgtatattcgtcgccgcgccgcactggtgtaacctgttgcctcagagtttgcttttagctggttctgttttaaaaataagtactgttttttggttggctgcaagccattctgaacttcagtttaccaattgtttttatgttgtggttgaatattttaattttttatttaatgtttggttctttttttatatatatttgcaaaaatgatacaagtggtcaagttttcatatagtatgggctctatttcctagagctctacctctaggaacgaattttgtggaggttttcttttggctagttaggcaaagtccccatatcttgcaggctaaatcaagaagaagctctgtcaaacagttttttttactgaaaagtgattaaagagtagtttctcctagatcacttcagagtttatcctagagaatcatgggaatcaaattcagttagaggatcatttcttacaaagaatcaactttcgtagagaatctaaagcagaaagagctttgacaaacttacccttagagcaattccaacattctcgcgtgagtttcttcgcgccgttgttttgcggtgacttcatctggacgtcccgcgacatagagacgcttgtattgatcatgagagcttgtgtggtcatacacaatataattgttaaagatgaaagagatgtggaccttaatgagcgattcgactttgatggtgaaaatgtgcaaccttctcatggtatttctactcgcacactagctgaatttattgaagctcataaaaagatccgagacaaagaaatacattttcaattgaaagaagacctaatcaagcacttatggtgtacacccgggaagcttggcgcgccggtcacccggtccgggcctagaaggccacccgggccccgtccactaactaatcgttaagcgggtttcccgttagctaagcactaggccggaatccccaagtttgtacaaaaaagcaggctccggccagaatggcccggaccgggttaccgaattgctaactaactagaattctgtacaaccggtctaactaactagcaattcgcccttgatactgtatatactcacagtatcatatgatactgtatatactcacagtatcatatgatactgtatatactcacagtataagggcgaattggcccttgatactgtatatactcacagtatcatatgatactgtatatactcacagtatcatatgatactgtatatactcacagtataagggcgaattgctgcagcccgggacaatcccactatccttcgcaagacccttcctctatataaggaagttcatttcatttggagaggactatttttacaacaattttacaattacaccggtaatggcggccaatgcgggcggcggtggagcgggaggaggcagcggcagcggcagcgtggctgcgccggcggtgtgccgccccagcggctcgcggtggacgccgacgccggagcagatcaggatgctgaaggagctctactacggctgcggcatccggtcgcccagctcggagcagatccagcgcatcaccgccatgctgcggcagcacggcaagatcgagggcaagaacgtcttctactggttccagaaccacaaggcccgcgagcgccagaagcgccgcctcaccagcctcgacgtcaacgtgcccgccgccggcgcggccgacgccaccaccagccaactcggcgtcctctcgctgtcgtcgccgccgccttcaggcgcggcgcctccctcgcccaccctcggcttctacgccgccggcaatggcggcggatcggctgtgctgctggacacgagttccgactggggcagcagcggcgctgctatggccaccgagacatgcttcctgcaggactacatgggcgtgacggacacgggcagctcgtcgcagtggccacgcttctcgtcgtcggacacgataatggcggcggccgcggcgcgggcggcgacgacgcgggcgcccgagacgctccctctcttcccgacctgcggcgacgacggcggcagcggtagcagcagctacttgccgttctggggtgccgcgtccacaactgccggcgccacttcttccgttgcgatccaacagcaacaccagctgcaggagcagtacagcttttacagcaacagcaacagcacccagctggccggcaccggcaaccaagacgtatcggcaacagcagcagcagccgccgccctggagctgagcctcagctcatggtgctccccttaccctgctgcagggagtatgtgaccgttaacagctgctgctgttctagggttcacaagtctgcctatttgtcttccccaatggagctatggttgtctggtctggtccttggtcgtgtcccgtttcattgtgtactatttacctgtaatgtgtatccttaagtctggtttgatggtgtctgaaacgttttgctgtggtagagcagcatggaagaactataatgaataagtgatccctaatcattgtgtccaaattttgcttctgctatacccttttgtgctgtttcttatgttttgcttaaaaatttgatctgacaaacaaatttgtctaaattatgctcttgttctgactgtgtactgtacacatttgtattgctaccggtttggcacatagttttctctttgattgcagatcaaacccttctgattgcagattgcttggctatggctgatgtgctcactgttcttctttagcttgtatattgctgatggtggcttggctacggctgaaaaagttgctgctgcgccgacttggcaactgttgctccagtaatgctttgtcctctcttcctagccgccgacttggcacttggcagctgttgctcctgtaatgcgttgttatctcttatctcttgagatgtactatgattttgaggctgtttgacttgtgccagattgccagtgctgatgctatattatctcaggtttttatgctagtatatgttttactgtgtgctgcctgtgtcgagttacgtaatctattgaaccgctatgcgtgttgatgccctgttgttgcttgccagattgatgcccctgttgcttgcagcttgcaagctgtagtgaaatcctaaaattccaaaccaaatctattctgaacttttgaagatctgtgatgtccggaagaaaagattcaaacagataaacgggactctccagaatctataaaataaatgatcgacaaacgctttgctttggtaggcttcggcgcgccggtcacccggtccgggcctagaaggccacccggggcacttaggagcgaagactaacggttagctagggctgatacctaaaccttagtcactagcagcgtctactagctaccaagcggccgcacgtcacggtcactacgaatcgaccgaagcttgcatgggccgcggcgcgccgcgacttattgaactagtctagggcgcggctaacaacctagcttagattgccttgtctaaacccttaggctaacgcgccactctagaaggccgatctcccccgaacgcgccagatccgatatcgatgggccctggccgaagcttggtcacccgcaccttgctagttggatattacctcttctcttcaaagtatccttgaacgctcaccggttatcaaatctctacactatagctctgtagtcttgctagatagttagttctttagctctctctagaggttcacaaactcaatacaacacacagtggagtagggtattacgctccggcggcccgaaccactctaaatccttgtgtcctcgtgtgctcttccaccattaatgactgtaattgcagggacacgaagagttgtagcgcttttgccaacaagatccgctatatgctagtagagtggaacctgcacagcaacaagcatccaataatctgagaataagaattatgtgtggtgatggttctcatctctgcaactcgccattttcgcgagagaaccaaatccaagttggtgaagatcatgatttgggctcatgggctggcatagtagctattacctttgcaattgtggttcgaatctatccgatattctccttttcagggagagctaatgcttatgcttattgggtattttggtttgacactgcttcacgcccaaaaaaaggcaactatgtctgagttggatatggcccaaaaaaaggcagctatgtctgagttggatatggaagtcttctttcgtttagggtgaagtaagaccaagctcatgagcttattatcttaggtcggaacaaattagttgataggcatggcacatttatcaaattataatgattttaacagaaaagcaacacctctttttcagcagcaccagctttgcaagctgcaattgacactccaagcatagtatttgctccaaactcagcctgcatttcgcacaatatcatatctatttccatttggataaaatatattttccagaaatatgggaacagaatcaagatacagaaaaaagttgtggtagtagtggtaagtggaaacacaagtacagtgaaaagatagcattatttctgaacagtcaaattaaccgaaataagtagtatcacatactgcccctaaattgactacacccaatgtaaagaattgcttgagcatattgagccatcagttgtttgtttgtgtaacggatttgacaatgcagagttcaggagcaaaaaaccgcaaaggagagaaagagggaaaggatctcctagtatcccaccttgtggcgcgccctgtcaagtgcatgatggcctggtcgatctgcgtctgctgctgcggttccatcccaacgagtgcctccgacaccttgtcgttgatcacccgcaccgcgtaggcgacccccctggcgaggaacttccgcctctcggaggccccggccgcgtcggcggcggcgccctcgagcgcgcccacgctagccgtagatgctcggtgcacggccttgttggtgtgcaactcgacctcaacggccggtgcgctacgcccgtcaaggatctggcgcgcccgcaccctcgtgatcacggtgggcgcctcccgcctcatgtggccgacgatgaaaagcgccgggttaggggccttggcgcgcaccgccgtattcagggcctcctcgctcttgcgcgagagcaggtgcttccccaggtactcctgcactgacaaggctgccacagcggtggaatttgtcctcacgacttcgccacgtcgtcctcacctccctggcttcccacgactccgccgtatcgaggtgctcggtgggtcgtcttaatccgaagtccgaactaggaagacgagacagagaggtctgaggaatgggcctcgtttgatgttgagctgaattatttttccagcataagcccaggtcttggtccatgaacaaaattactagaaacccagcccagtactacgatctaaaagagggactgccactggatagctctctctagcattctccacgctccaatacagcggcgtcgtgtctatccgggtctatccgcgaacacgtgagaactctccagaaactgctttctcctccacttcatctctctcgctttccctctataaaaagaccccttctaggaattgagggagacagcaagcaccaagcagcgatccgaagctcaatcaattcactcaaacctcttccccaaatcttcgattagatcttcgttgacaagaagactagaaccgaacctgacatgtccaacctgctcacggttcaccagaaccttccggctcttccagtggacgcgacgtccgatgaagtcaggaagaacctcatggacatgttccgcgacaggcaagcgttcagcgagcacacctggaagatgctgctctccgtctgccgctcctgggctgcatggtgcaagctgaacaacaggaagtggttccccgctgagcccgaggacgtgagggattaccttctgtacctgcaagcgcgaggtttgtttctgcttctacctttgatatatatataataattatcattaattagtagtaatataatatttcaaatatttttttcaaaataaaagaatgtagtatatagcaattgcttttctgtagtttataagtgtgtatattttaatttataacttttctaatatatgaccaaaacatggtgatgcctaggtctggcagtgaagaccatccagcaacaccttggacaactgaacatgcttcacaggcgctccggcctcccgcgccccagcgactcgaacgccgtgagcctcgtcatgcgccgcatcaggaaggaaaacgtcgatgccggcgaaagggcaaagcaggccctcgcgttcgagaggaccgatttcgaccaggtccgcagcctgatggagaacagcgacaggtgccaggacattaggaacctggcgttcctcggaattgcatacaacacgctcctcaggatcgcggaaattgcccgcattcgcgtgaaggacattagccgcaccgacggcggcaggatgcttatccacattggcaggaccaagacgctcgtttccaccgcaggcgtcgaaaaggccctcagcctcggagtgaccaagctcgtcgaacgctggatctccgtgtccggcgtcgcggacgacccaaacaactacctcttctgccgcgtccgcaagaacggggtggctgcccctagcgccaccagccaactcagcacgagggccttggaaggtattttcgaggccacccaccgcctgatctacggcgcgaaggatgacagcggtcaacgctacctcgcatggtccgggcactccgcccgcgttggagctgctagggacatggcccgcgccggtgtttccatccccgaaatcatgcaggcgggtggatggacgaacgtgaacattgtcatgaactacattcgcaaccttgacagcgagacgggcgcaatggttcgcctcctggaagatggtgactgaggtacccaacctagacttgtccatcttctggattggccaacttaattaatgtatgaaataaaaggatgcacacatagtgacatgctaatcactataatgtgggcatcaaagttgtgtgttatgtgtaattactagttatctgaataaaagagaaagagatcatccatatttcttatcctaaatgaatgtcacgtgtctttataattctttgatgaaccagatgcatttcattaaccaaatccatatacatataaatattaatcatatataattaatatcaattgggttagcaaaacaaatctagtctaggtgtgttttgcgatccgatatcgacgtctaaaaacggcccctaactaacgcttagttgcccgctagattagtcccccgttagtgcctagttagacacacgacgaactaggggctagtgccaccttgctagttggatattacctcttctcttcaaagtatccttgaacgctcaccggttatcaaatctctacactatagctctgtagtcttgctagatagttagttctttagctctcgcacgataacttcgtatagcatacattatacgaagttataacagcggaccgggttaccgaattcctgcccttaaggccaattgttcaagattcattcaacaattgaaacatctcccatgattaaatcagtataaggttgctatggtcttgcttgacaaagtttttttttgagggaatttcaactaaatttttgagtgaaactatcaaatactgattttaaaaaatttttataaaaggaagcgcagagataaaaggccatctatgctacaaaagtacccaaaaatgtaatcctaaagtatgaattgcattttttttttgtttggacgaaaggaaaggagtattaccacaagaatgatatcatcttcatatttagatcttttttgggtaaagcttgagattctctaaatatagagaaatcagaagaaaaaaaaaccgtgttttggtggttttgatttctagcctccacaataactttgacggcgtcgacaagtctaacggacaccaagcagcgaaccaccagcgccgagccaagcgaagcagacggccgagacgttgacaccttcggcgcggcatctctcgagagttccgctccggcgctccacctccaccgctggcggtttcttattccgttccgttccgcctcctgctctgctcctctccacaccacacggcacgaaaccgttacggcaccggcagcacccagcacgggagaggggattcctttcccaccgttccttccctttccgccccgccgctataaatagccagccccatccccagcttttttccccaatctcatctcctctctcctgttgttcggagcacacgcacaatccgatcgatccccaaatccccttcgtctctcctcgcgagcctcgtggatcccagcttcaaggtacggcgatcgatcatcccccctccttctctctaccttcttttctctagactacatcggatggcgatccatggttagggcctgctagtttcccttcctgttttgtcgatggctgcgaggcacaatagatctgatggcgttatgacggctaacttgtcatgttgttgcgatttatagtccctttaggagatcagtttaatttctcggatggttcgagatcggtggtccatggttagtaccctaagatccgcgctgttagggttcgtagatggaggcgacctgttctgattgttaacttgtcagtacctgggaaatcctgggatggttctagctcgtccgcagatgagatcgatttcatgatcctctgtatcttgtttcgttgcctaggttccgtctaatctatccgtggtatgatgtagatgttttgatcgtgctaactacgtcttgtaaagttaattgtcaggtcataatttttagcatgcctttttttttgtttggttttgtctaattgggctgtcgttctagatcagagtagaagactgttccaaactacctgctggatttattgaacttggatctgtatgtgtgtcacatatcttcataaattcatgattaagatggattgaaatatcttttatctttttggtatggatagttctatatgttggtgtggctttgttagatgtatacatgcttagatacatgaagcaacgtgctgctactgtttagtaattgctgttcatttgtctaataaacagataaggatatgtatttatgttgctgttggttttgctggtactttgttggatacaaatgcttcaatacagaaaacagcatgctgctacgatttaccatttatctaatcttatcatatgtctaatctaataaacaaacatgcttttaaattatcttcatatgcttggatgatggcatacacagcggctatgtgtggttttttaaatacccagcatcatgggcatgcatgacactgctttaatatgctttttatttgcttgagactgtttcttttgtttatactgaccctttagttcggtgactcttctgcaggtcgactttaacttagcctaggatccatggcccagtccaagcacggcctgaccaaggagatgaccatgaagtaccgcatggagggctgcgtggacggccacaagttcgtgatcaccggcgagggcatcggctaccccttcaagggcaagcaggccatcaacctgtgcgtggtggagggcggccccttgcccttcgccgaggacatcttgtccgccgccttcatgtacggcaaccgcgtgttcaccgagtacccccaggacatcgtcgactacttcaagaactcctgccccgccggctacacctgggaccgctccttcctgttcgaggacggcgccgtgtgcatctgcaacgccgacatcaccgtgagcgtggaggagaactgcatgtaccacgagtccaagttctacggcgtgaacttccccgccgacggccccgtgatgaagaagatgaccgacaactgggagccctcctgcgagaagatcatccccgtgcccaagcagggcatcttgaagggcgacgtgagcatgtacctgctgctgaaggacggtggccgcttgcgctgccagttcgacaccgtgtacaaggccaagtccgtgccccgcaagatgcccgactggcacttcatccagcacaagctgacccgcgaggaccgcagcgacgccaagaaccagaagtggcacctgaccgagcacgccatcgcctccggctccgccttgccctccggactcagatctcgatagggtaccaatggccagttaacagatccagctgctgctgttctagggttcacaagtctgcctatttgtcttccccaatggagctatggttgtctggtctggtccttggtcgtgtcccgtttcattgtgtactatttacctgtaatgtgtatccttaagtctggtttgatggtgtctgaaacgttttgctgtggtagagcagcatggaagaactataatgaataagtgatccctaatcattgtgtccaaattttgcttctgctatacccttttgtgctgtttcttatgttttgcttaaaaatttgatctgacaaacaaatttgtctaaattatgctcttgttctgactgtgtactgtacacatttgtattgctaccggtttggcacatagttttctctttgattgcagatcaaacccttctgattgcagattgcttggctatggctgatgtgctcactgttcttctttagcttgtatattgctgatggtggcttggctacggctgaaaaagttgctgctgcgccgacttggcaactgttgctccagtaatgctttgtcctctcttcctagccgccgacttggcacttggcagctgttgctcctgtaatgcgttgttatctcttatctcttgagatgtactatgattttgaggctgtttgacttgtgccagattgccagtgctgatgctatattatctcaggtttttatgctagtatatgttttactgtgtgctgcctgtgtcgagttacgtaatctattgaaccgctatgcgtgttgatgccctgttgttgcttgccagattgatgcccctgttgcttgcagcttgcaagctgtagtgaaatcctaaaattcgaaaccaaatctattctgaacttttgaagatctgtgatgtccggaagaaaagattcaaacagataaacgggactctccagaatctataaaataaatgatcgacaaacgctttgctttggtaggcttcctagttagttagcggaccgaagcttcggtccgggcctgcggccgcagatatcagaacctgcgtctggacgcacaagtcatagcattatcggctaaaatttcttaatttctaaattagtcatatcggctaagaaagtggggagcactatcatttcgtagaacaagaacaaggtatcatatatatatatatatataatatttaaactttgttaagtggaatcaaagtgctagtattaatggagtttcatgtgcattaaattttatgtcacatcagcaattttgttgacttggcaaggtcatttagggtgtgtttggaagacaggggctattaggagtattaaacatagtctaattacaaaactaattgcacaaccgctaagctgaatcgcgagatggatctattaagcttaattagtccatgatttgacaatgtggtgctacaataaccatttgctaatgatggattacttaggtttaatagattcgtctcgtgatttagcctatgggttctgctattaattttgtaattagctcatatttagttcttataattagtatccgaacatccaatgtgacatgctaaagtttaaccctggtatccaaatgaagtcttatgagagtttcatcactccggtggtatatgtacttaggctccgttttcttccaccgacttatttttagcacccgtcacattgaatgtttagatactaattagaagtattaaacgtagactatttacaaaatccattacataagacgaatctaaacggcgagacgaatctattaaacctaattagtccatgatttgacaatgtgttgctacagtaaacatttgctaatgatggattaattaggcttaatagattcgtctcgccgtttagcctccacttatgtaatgggttttctaaacaatctacgtttaatactcctaattagtatctaaatattcaatgtgacacgtgctaaaaataagtcagtggaaggaagagaacgtccccttagttttccatcttattaattgtacgatgaaactgtgcagccagatgattgacaatcgcaatacttcaactagtgggccatgcacatcagcgacgtgtaacgtcgtgagttgctgttcccgtagagaaatatcaactggtgggccacgcacatcagcgtcgtgtaacgtggacggaggagccccgtgacggcgtcgacatcgaacggccaccaaccacggaaccacccgtccccacctctcggaagctccgctccacggcgtcgacatctaacggctaccagcaggcgtacgggttggagtggactccttgcctctttgcgctggcggcttccggaaattgcgtggcggagacgaggcgggctcgtctcacacggcacggaagacgtcacgggttccttccccacctctcctcttccccaccgccataaatagccgaccccctcgcctttctccccaatctcatctcgtctcgtgttgttcggagcacaccacccgccccaaatcgttcttcccgcaagcctcggcgatccttcacccgcttcaaggtacggcgatcgtcttcctcctctagatcggcgtgatctgcaagtagttgatttggtagatggttaggatctgtgcactgaagaaatcatgttagatccgcgatgtttctgttcgtagatggctgggaggtggaatttttgtgtagatctgatatgttctcctgtttatcttgtcacgctcctgcgatttgtggggattttaggtcgttgatctgggaatcgtggggttgcttctaggctgttcgtagatgaggtcgttctcacggtttactggatcattgcctagtagatcagctcgggctttcgtctttgtatatggtgcccatacttgcatctatgatctggttccgtggtgttacctaggtttctgcgcctgattcgtccgatcgattttgttagcatgtggtaaacgtttggtcatggtctgatttagattagagtcgaataggatgatctcgatctagctcttgggattaatatgcatgtgtcaccaatctgttccgtggttaagatgatgaatctatgcttagttaatgggtgtagatatatatgctgctgttcctcaatgatgccgtagcttttacctgagcagcatggatcgtcctgttacttaggtagatgcacatgcttatagatcaagatatgtactgctactgttggaattctttagtatacctgatgatcatccatgctcttgttacttgttttggtatacttggatgatggcatgctgctgctttttgttgatttgagcccatccatatctgcatatgtcacatgattaagatgattacgctgtttctgtatgatgccatagcttttatgtgagcaacatgcatcctcctggttatatgcattaatagatggaagatatctattgctacaatttgatgattattttgtacatacgatgatcaagcatgctcttcatactttgttgatatacttggataatgaaatgctgctgcacgttcattctatagcactaatgatgtgatgaacacgcacgacctgtttgtggcatctgtttgaatgtgttgttgctgttcactagagactgttttattaacctactgctagatacttacccttctgtctgtttattcttttgcagccagaatagcggatccgcccatggtcgaacaggacggcctgcatgcaggatcaccagcggcctgggtcgaaagactcttcggctacgactgggcacaacagaccatcgggtgtagcgacgcagctgttttcaggctgtccgcacagggcagacccgttttgttcgtcaaaacagacctgtctggcgcgctcaacgaactgcaagacgaggccgcaagactgagctggcttgctaccacaggcgttccttgtgctgcagtcctcgacgtcgttactgaggctggaagagactggctgctcctgggtgaagtcccaggacaggaccttttgtccagccatctggcacctgccgaaaaggtcagcatcatggcagacgccatgagaaggctgcacacactcgaccctgcaacatgccccttcgatcaccaggcaaaacacaggatcgagcgcgcaagaacgcgcatggaggctggtttggtcgaccaagatgacctcgacgaggaacaccaaggactggctcctgctgaactcttcgccagactcaaggcgagaatgccagacggtgacgacctggtcgtcacacacggcgacgcttgtctcccaaacataatggtcgagaacggacgcttcagcggtttcatcgactgcggtagactcggagtcgctgacagataccaggacatcgccctggcaacacgcgacatcgcagaggaactcggaggcgaatgggctgacaggtttctcgtgctctacggtatcgctgctccagacagccagaggatcgcattctacaggctcctcgacgagttcttttagttcgaacggtacccggggatcctctagtgccgtgggtcgtttaagctgccgctgtacctgtgtcgtctggtgccttctggtgtacctgggaggttgtcgtctatcaagtatctgtggttggtgtcatgagtcagtgagtcccaatactgttcgtgtcctgtgtgcattatacccaaaactgttatgggcaaatcatgaataagcttgatgttcgaacttaaaagtctctgctcaatatggtattatggttgtttttgttcgtctcctaatatttgcctgggatcaaattttattggctggtgttcatttgacctccatgttcttgctaggctccattttttactctacagccataatatgtttgattgtttggtttgttctttgttgtacacctggttctgtcgagcttagttttcgacactggcttacagcttaacatgttgctattttattgggttctgattgctattttattgggttctgattgctagtttttgctgaatccaaaaaccatgttatttatttaagcgatccaggttattattatgatggtggctaagtttttttttttccaagggtaaattttctggattctccagtgtttctgtggccgaattcaatcactagagtcgacctgcatgattccgatgacttcgtaggttcctagctcaagccgctcgtgtccaagcgtcacttacgattagctaatgattacggcatctaggaccgactagctagctagctaagagctcggtaccgagctcgaattcattccgattaatcgtggcctcttgctcttcaggatgaagagctatgtttaaacgtgcaagcgctactagacaattcagtacattaaaaacgtccgcaatgtgttattaagttgtctaagcgtcaatttgtttacaccacaatatatcctgcca

SEQ ID NO: 345 - DNA, 2597 bp, Artificial Sequence
  3xENH-UBI
atcgagcagctggcttgtggggaccagacaaaaaaggaatggtgcagaattgttaggcgcacctaccaaaagcatctttgcctttattgcaaagataaagcagattcctctagtacaagtggggaacaaaataacgtggaaaagagctgtcctgacagcccactcactaatgcgtatgacgaacgcagtgacgaccacaaaactcgagcaacgagatcatgagccaatcaaagaggagtgatgtagacctaaagcaataatggagccatgacgtaagggcttacgcccatacgaaataattaaaggctgatgtgacctgtcggtctctcagaacctttactttttatgtttggcgtgtatttttaaatttccacggcaatgacgatgtgaccgtcgacccactaaaacattgctttgtcaaaagctaaaaaagatgatgcccgacagccacttgtgtgaagcatgagaagccggtccctccactaagaaaattagtgaagcatcttccagtggtccctccactcacagctcaatcagtgagcaacaggacgaaggaaatgacgtaagccatgacgtctaatcccagggccagcttgcatgcctgcagtgcagcgtgacccggtcgtgcccctctctagagataatgagcattgcatgtctaagttataaaaaattaccacatattttttttgtcacacttgtttgaagtgcagtttatctatctttatacatatatttaaactttactctacgaataatataatctatagtactacaataatatcagtgttttagagaatcatataaatgaacagttagacatggtctaaaggacaattgagtattttgacaacaggactctacagttttatctttttagtgtgcatgtgttctcctttttttttgcaaatagcttcacctatataatacttcatccattttattagtacatccatttagggtttagggttaatggtttttatagactaatttttttagtacatctattttattctattttagcctctaaattaagaaaactaaaactctattttagtttttttatttaataatttagatataaaatagaataaaataaagtgactaaaaattaaacaaataccctttaagaaattaaaaaaactaaggaaacatttttcttgtttcgagtagataatgccagcctgttaaacgccgtcgacgagtctaacggacaccaaccagcgaaccagcagcgtcgcgtcgggccaagcgaagcagacggcacggcatctctgtcgctgcctctggacccctctcgagagttccgctccaccgttggacttgctccgctgtcggcatccagaaattgcgtggcggagcggcagacgtgagccggcacggcaggcggcctcctcctcctctcacggcaccggcagctacgggggattcctttcccaccgctccttcgctttcccttcctcgcccgccgtaataaatagacaccccctccacaccctctttccccaacctcgtgttgttcggagcgcacacacacacaaccagatctcccccaaatccacccgtcggcacctccgcttcaaggtacgccgctcgtcctcccccccccccctctctaccttctctagatcggcgttccggtccatgcatggttagggcccggtagttctacttctgttcatgtttgtgttagatccgtgtttgtgttagatccgtgctgctagcgttcgtacacggatgcgacctgtacgtcagacacgttctgattgctaacttgccagtgtttctctttggggaatcctgggatggctctagccgttccgcagacgggatcgatttcatgattttttttgtttcgttgcatagggtttggtttgcccttttcctttatttcaatatatgccgtgcacttgtttgtcgggtcatcttttcatgcttttttttgtcttggttgtgatgatgtggtctggttgggcggtcgttctagatcggagtagaattctgtttcaaactacctggtggatttattaattttggatctgtatgtgtgtgccatacatattcatagttacgaattgaagatgatggatggaaatatcgatctaggataggtatacatgttgatgcgggttttactgatgcatatacagagatgctttttgttcgcttggttgtgatgatgtggtgtggttgggcggtcgttcattcgttctagatcggagtagaatactgtttcaaactacctggtgtatttattaattttggaactgtatgtgtgtgtcatacatcttcatagttacgagtttaagatggatggaaatatcgatctaggataggtatacatgttgatgtgggttttactgatgcatatacatgatggcatatgcagcatctattcatatgctctaaccttgagtacctatctattataataaacaagtatgttttataattattttgatcttgatatacttggatgatggcatatgcagcagctatatgtggatttttttagccctgccttcatacgctatttatttgcttggtactgtttcttttgtcgatgctcaccctgttgtttggtgttacttctgcag

SEQ ID NO: 346 - DNA, 948 bp, Artificial Sequence
  MO-LEXA-MO-CBF1A
atgaaagcgctcaccgcccgccaacaggaggtcttcgacctgatcagggatcacatctcccagacaggcatgccaccaacaagggcggaaatcgcacagaggctcgggtttcgctcgccaaacgctgccgaggagcaccttaaggcgctcgcgcgcaaaggcgttatcgagattgtgagcggagccagccgcggaatcaggctcttacaggaggaggaagagggacttccacttgtgggcagagtggccgctgacgaaccactccttgcccagcagcacatcgaaggacactaccaggtcgacccatccctgttcaagccaaacgccgatttcctcctccgcgtgtccgggatggcgatgaaagacatcggcatcatggacggcgacctgctggccgtccataaaactcaggacgtgcgcaacggccaggtggtggtggcccgcatcgacgatgaggtcacggtgaaacgcctcaagaagcagggcaataaagtggagctcctccccgaaaatagcgagttcaaaccaatcgtggtcgaccttcggcaacagtctttcacgattgagggcctggcggtgggcgttatcaggaacggcgattggcttggaggatccagctccccgccacccccgccaccgccaccgcccccgacctgcgccaaggacatccagaaagcagccgccgaagcggccctcgccttccaagacgagacgtgcgatacaaccaccacgaatcatggcctcgatatggaggaaacgatggtcgaagccatctacaccccagagcagtcagaaggcgccttctacatggacgaggaaaccatgttcggcatgccgaccctcctcgacaacatggccgaaggaatgctcctcccacctccctcagttcagtggaaccacaactacgacggcgaaggcgacggagacgtttccctgtggagctactag

SEQ ID NO: 347 - protein, 315 aa, Artificial Sequence
  MO-LEXA-MO-CBF1A PRT
MKALTARQQEVFDLIRDHISQTGMPPTRAEIAQRLGFRSPNAAEEHLKALARKGVIEIVSGASRGIRLLQEEEEGLPLVGRVAADEPLLAQQHIEGHYQVDPSLFKPNADFLLRVSGMAMKDIGIMDGDLLAVHKTQDVRNGQVVVARIDDEVTVKRLKKQGNKVELLPENSEFKPIVVDLRQQSFTIEGLAVGVIRNGDWLGGSSSPPPPPPPPPPTCAKDIQKAAAEAALAFQDETCDTTTTNHGLDMEETMVEAIYTPEQSEGAFYMDEETMFGMPTLLDNMAEGMLLPPPSVQWNHNYDGEGDGDVSLWSY

SEQ ID NO: 348 - DNA, 277 bp, Artificial Sequence
  6xREC-MIN35S
aattcgcccttgatactgtatatactcacagtatcatatgatactgtatatactcacagtatcatatgatactgtatatactcacagtataagggcgaattggcccttgatactgtatatactcacagtatcatatgatactgtatatactcacagtatcatatgatactgtatatactcacagtataagggcgaattgctgcagcccgggacaatcccactatccttcgcaagacccttcctctatataaggaagttcatttcatttggagaggac
